United States Patent Application Publication US 2011/0166335 A1 - sequence listing, part 4

SEQ ID NO: 4194 - DNA, 1105 bp, Xenorhabdus sp.
  unsure (1)..(1105): unsure at all n locations
nnnnnnnnnnnnnnnnnnnnnnnnnnnnnnnnnnnnnnnnnnnnnnnnnnnnnnnnnnnnnnnnnnnnnnnnnnnnnnnnnnnnnnnnatgaaatttataactcagttgtcagaacaatactcgagctgcctgaattaatatattaaggaattataaatagtgcagcagatggttaaaactatcgtgctggtatataacaacctgcctagaccacacaaaatcatgcttggttctttgacattggtcactttaactgaggctgtgtggcgcccggtggtttatcaccaacaaaaagaaagaatggaaaggatcgnnnnnnnnnnnnnnnnnnnnnnnnnnnnnnnnnnnnnnnnnnnnnnnnnnnnnnnnnnnnnnnnnnnnnnnnnnnnnnnnnnnnnnnnnnnnnnnnnnnnnnnnnnnnnnnnnnnnnnnnnnnnnnnnnnnnnnnnnnnnnnnnnnnnnnnnnnnnnnnnnnnnnnnnnnnnnnnnnnnnnnnnnnnnnnnnnnnnnnnnnnnnnnnnnnnnnnnnnnnnnnnnnnnnnnnnnnnnnnnnnnnnnnnnnnnnnnnnnnnnnnnnnnnnnnnnnnnnnnnnnnnnnnnnnnnnnnnnnnnnnnnnnnnnnnnnnnnnnnnnnnnnnnnnnnnnnnnnnnnnnnnnnnnnnnnnnnnnnnnnnnnnnnnnnnnnnnnnnnnnnnnnnnnnnnnnnnnnnnnnnnnnnnnnnnnnnnnnnnnnnnnnnnnnnnnnnnnnnnnnnnnnnnnnnnnnnnnnnnnnnnnnnnnnnnnnnnnnnnnnnnnnnnnnnnnnnnnnnnnnnnnnnnnnnnnnnnnnnnnnnnnnnnnnnnnnnnnnnnnnnnnnnnnnnnnnnnnnnnnnnnnnnnnnnnnnnnnnnnnnnnnnnnnnnnnnnnnnnnnnnnnnnnnnnnnnnnnnnnnnnnnnnnnnnnnnnnnnnnnnnnnnnnnnnnnnnnnnnnnnnnnnnnnnnnnnnnnnnnnnnnnnnnnnnnnnnnnnnnnnnnnnnnnnnnnnnnnnnnnnnnnnnnnnnnnnnnnnnnnnnnnnnnnnnnnnnnnnnnnnnnnnnnnnnnnnnnnnnnnnnnnnnnnnnnn

SEQ ID NO: 4195 - DNA, 960 bp, Xenorhabdus sp.
  unsure (1)..(960): unsure at all n locations
nnnnnnnnnnnnnnnnnnnnnnnnnnnntgtgctctaaagatgggggccatgaattacaacttggataagcacaccctgatcacgtgcttgcgcgtacacatgtctggctgcaataaaggaacgctcaaaccgggcatgaaagttgatgtggtaaataattgaaccggatatctatctatctatttttctcatgaacaagctctgcgacaccggacatataaagagtctattgactgggcgctgcggacacaaaccttattttgaataaatatatgaacaacgcatcatctaaaggaatgatctgcatgacactcatacctgagttgatttgatcaatgctgggcaaattattaaaccgataccacacagtctgtggcgcttatacttgcagaaaaggcgaagacacgacattaaaaccacgtgctacagtgcacaatnnnnnnnnnnnnnnnnnnnnnnnnnnnnnnnnnnnnnnnnnnnnnnnnnnnnnnnnnnnnnnnnnnnnnnnnnnnnnnnnnnnnnnnnnnnnnnnnnnnnnnnnnnnnnnnnnnnnnnnnnnnnnnnnnnnnnnnnnnnnnnnnnnnnnnnnnnnnnnnnnnnnnnnnnnnnnnnnnnnnnnnnnnnnnnnnnnnnnnnnnnnnnnnnnnnnnnnnnnnnnnnnnnnnnnnnnnnnnnnnnnnnnnnnnnnnnnnnnnnnnnnnnnnnnnnnnnnnnnnnnnnnnnnnnnnnnnnnnnnnnnnnnnnnnnnnnnnnnnnnnnnnnnnnnnnnnnnnnnnnnnnnnnnnnnnnnnnnnnnnnnnnnnnnnnnnnnnnnnnnnnnnnnnnnnnnnnnnnnnnnnnnnnnnnnnnnnnnnnnnnnnnnnnnnnnnnnnnnnnnnnnnnnnnnnnnnnnnnnnnnnnnnnnnnnnnnnnnnnnnnnnnnnnnnnnnnnnnnnnnnnnnnnnnnnnnnnnnnnnnnn

SEQ ID NO: 4196 - DNA, 888 bp, Xenorhabdus sp.
  unsure (1)..(888): unsure at all n locations
nnnnnnnnnnnnnnnnnnnnnnnnnnnnnnnaggccctgttcgctatcgatgaatgtcctggcggcttttggattggtcaattccaccagatcttccggcacggtaaaagacgtggcctcggtaatttcggcgcgcaggcgcgcgcggcgcgaataaagctgcgcaagcgtgttctcgacgatggataaattggcctggacgatcgtatcgctcagccgcagcaatatctgccctgcatcgaccctgtcaccttcggcgaccttgatctcgctgacgattccgccggaaagatgctggattttcttggaattgccttcgacgacgacccgcccggtggcgacgacggcgccggcaagctttgccatggccgcccagccgcccaatccgacgagcagtccgatggcgagaaccatcacggccgcggagtgccttatgagggacgcatgtgtcacgccggctttttcctgctcacccattttcgctcacccggttttcgatcttgcgtgtttcttcctccgctgccggcacctgatgnnnnnnnnnnnnnnnnnnnnnnnnnnnnnnnnnnnnnnnnnnnnnnnnnnnnnnnnnnnnnnnnnnnnnnnnnnnnnnnnnnnnnnnnnnnnnnnnnnnnnnnnnnnnnnnnnnnnnnnnnnnnnnnnnnnnnnnnnnnnnnnnnnnnnnnnnnnnnnnnnnnnnnnnnnnnnnnnnnnnnnnnnnnnnnnnnnnnnnnnnnnnnnnnnnnnnnnnnnnnnnnnnnnnnnnnnnnnnnnnnnnnnnnnnnnnnnnnnnnnnnnnnnnnnnnnnnnnnnnnnnnnnnnnnnnnnnnnnnnnnnnnnnnnnnnnnnnnnnnnnnnnnnnnnnnnnnnnnnnnnnnnnnnnnnnnn

SEQ ID NO: 4197 - DNA, 1215 bp, Xenorhabdus sp.
  unsure (1)..(1215): unsure at all n locations
nnnnnnnnnnnnnnnnnnnnnnnnnnnnnnnnnnnnnnnnnnnnnnnnnnnnnnnnnnnnnnnnnnnnnnnnnnnnnnnnnnnnnnnnnnnnnnnnnnnnnnnnnnnnnnnnnnnnnnnnnnnnnnnnnnnnnnnnnnnnnnnnnnnnnnnnnnnnnnnnnnnnnnnnnnnnnnnnnnnnnnnnnnnnnnnnnnnnnnnnnnnnnnnnnnnnnnnnnnnnnnnnnnnnnnnnnnnnnnnnnnnnnnnnncccccccccccccccccccnnnnnnnnnnngcgccggcccccccccggcggcnccccccccccccaccccccccccccccaaccccccccccccccccccccccgggacgccgggccccccccccttntttttttnnncccnccccccccccccccnncccnacacccccccccggcggggccncccnnncccccccccccccaccccccccccccaccccccccccccccccccccccacccccccccccccccccccccccccccaacaccccccccccccccccccgccccncccccccccccccccggccccccccccccgccccccccccccccccccccgccccccccccccccccccccgcgcccccccccccccccccccccccccccccccccgcccccccccccccccccccccgcccggccccccgccccccccgcccacccaccccgcgcccgcaccccccccccccccccccgccccccgccgccccccaccccccccngccccccccccnccccgcccccccccccccccgcacgcccggcccccccgncgccccccccccccaaaccacccccccccccacccaccccccgcccngncccccccgcccccccccccccccccgacccccgcccccccccgcgccaccacccccccccccccccccccccccccccccgccccgaccccccnnnnnnnnnnnnnnnnnnnnnnnnnnnnnnnnnnnnnnnnnnnnnnnnnnnnnnnnnnnnnnnnnnnnnnnnnnnnnnnnnnnnnnnnnnnnnnnnnnnnnnnnnnnnnnnnnnnnnnnnnnnnnnnnnnnnnnnnnnnnnnnnnnnnnnnnnnnnnnnnnnnnnnnnnnnnnnnnnnnnnnnnnnnnnnnnnnnnnnnnnnnnnnnnnnnnnnnnnnnnnnnnnnnnnnnnnnnnnnnnnnnnnnnnnnnnnnnnnnnnn

SEQ ID NO: 4198 - DNA, 934 bp, Xenorhabdus sp.
  unsure (1)..(934): unsure at all n locations
nnnnnnnnnnnnnnnnnnnnnnnnnnnnnnnnngctctaaagctttagagcagacaagctgatgtaatcccgcaacaatcatcacggaaacgtgagcctgatccgccccccggttttttaccggttggcagccggcgccggaaggcagtaaatatgacaacaataatcatgtttattgcgacatgatgcggtgcgcctgtccctcgcccgcctcatgcgccaggccaatacgccaccgggtcgattgatgagcaaagccctgtttgaggttcttgatgccaaggaagaaaaccgcctgatgcggtttttccgccggcgcctgcagaaccgggaagacgccgccgacgccatgcaggaaaccctgctgcgggcgctggaggtttctcatgcgacgctgatcgacaatccgcaagcctatctctttcaaatcgcccggtcggtcgcccgcctgacggtcatccgccagtcgcgcgnnnnnnnnnnnnnnnnnnnnnnnnnnnnnnnnnnnnnnnnnnnnnnnnnnnnnnnnnnnnnnnnnnnnnnnnnnnnnnnnnnnnnnnnnnnnnnnnnnnnnnnnnnnnnnnnnnnnnnnnnnnnnnnnnnnnnnnnnnnnnnnnnnnnnnnnnnnnnnnnnnnnnnnnnnnnnnnnnnnnnnnnnnnnnnnnnnnnnnnnnnnnnnnnnnnnnnnnnnnnnnnnnnnnnnnnnnnnnnnnnnnnnnnnnnnnnnnnnnnnnnnnnnnnnnnnnnnnnnnnnnnnnnnnnnnnnnnnnnnnnnnnnnnnnnnnnnnnnnnnnnnnnnnnnnnnnnnnnnnnnnnnnnnnnnnnnnnnnnnnnnnnnnnnnnnnnnnnnnnnnnnnnnnnnnnnnnnnnnnnnnnnnnnnnnnnnnnnnnnnnnnnnnnnnnnnnnnnnnnnnnnnnnnnnnnnnnnnnnnnn

SEQ ID NO: 4199 - DNA, 1165 bp, Xenorhabdus sp.
  unsure (1)..(1165): unsure at all n locations
nnnnnnnnnnnnnnnnnnnnnnnnnnnnnnnnnnnnnnnnnnnnnnnnnnnnnnnnnnnnnnnnnnnnnnnnnnnnnnnnnnnnnnnnnnnnnnnnnnnnnnnnnnaatcatactaacacctcatatattattcccaagtttcaaaataatgcaaaaattaacatgggggagttttaattttaaacgaacaggctcaaaataacggcctcacagaaaaatattataatcattcctaatttcaaggatccctctaattgtttattacttctaccagatatccctcataataattaaaccatccaagtgcctcaactcaaaagaannnnnnnnnnnnnnnnnnnnnnnnnnnnnnnnnnnnnnnnnnnnnnnnnnnnnnnnnnnnnnnnnnnnnnnnnnnnnnnnnnnnnnnnnnnnnnnnnnnnnnnnnnnnnnnnnnnnnnnnnnnnnnnnnnnnnnnnnnnnnnnnnnnnnnnnnnnnnnnnnnnnnnnnnnnnnnnnnnnnnnnnnnnnnnnnnnnnnnnnnnnnnnnnnnnnnnnnnnnnnnnnnnnnnnnnnnnnnnnnnnnnnnnnnnnnnnnnnnnnnnnnnnnnnnnnnnnnnnnnnnnnnnnnnnnnnnnnnnnnnnnnnnnnnnnnnnnnnnnnnnnnnnnnnnnnnnnnnnnnnnnnnnnnnnnnnnnnnnnnnnnnnnnnnnnnnnnnnnnnnnnnnnnnnnnnnnnnnnnnnnnnnnnnnnnnnnnnnnnnnnnnnnnnnnnnnnnnnnnnnnnnnnnnnnnnnnnnnnnnnnnnnnnnnnnnnnnnnnnnnnnnnnnnnnnnnnnnnnnnnnnnnnnnnnnnnnnnnnnnnnnnnnnnnnnnnnnnnnnnnnnnnnnnnnnnnnnnnnnnnnnnnnnnnnnnnnnnnnnnnnnnnnnnnnnnnnnnnnnnnnnnnnnnnnnnnnnnnnnnnnnnnnnnnnnnnnnnnnnnnnnnnnnnnnnnnnnnnnnnnnnnnnnnnnnnnnnnnnnnnnnnnnnnnnnnnnnnnnnnnnnnnnnnnnnnnnnnnnnnnnnnnnnnnnnnnnnnnnnnnnnnnnnnnnnnnnnnnnnnnnnnnnnnnnnnnnnnnnnnnnnnnnnnnnnnnnnnnnnnnnnnnnnnnnnnnnnnnnnnnnnnnnnnnnnnnnnnnnnnnn

SEQ ID NO: 4200 - DNA, 1081 bp, Xenorhabdus sp.
  unsure (1)..(1081): unsure at all n locations
nnnnnnnnnnnnnnnnnnnnnnnnnctaaaaccgggcggctgcgagtttcagccgggccggaaagcgcaggaaagcgatgaaggctgcaacgagaatgatggcggcaaggagtgttgcggaaacggatggaagtgcatcgaagatcgcccgtgcttcgccctgaacgatccggttggcgcgaaacgtcatgaaaggcgatacaaaaagcgcataaagtagcaggcacgaaatcagcacacccaccttgtcaggccatttcgtcaaatcctgctcccctgcaccctggtccagcgctgggccggaagagcgctgcggttcccgcagcccaccccggcaccatgatcgcttacttgacgaaaccgttctttgtcaggaagtcgagcgccacggtcttcgcctgttcaccacccacctgcacacgcgcattcagatcctgcagggtcgccagatcgagtttctcgaacacgggtttcagcagttcctcgatattgggatgctttttcagagcctcttcacgaatgatcggtgcgggctgatagaccggctgcacatgtttgtcgtcnnnnnnnnnnnnnnnnnnnnnnnnnnnnnnnnnnnnnnnnnnnnnnnnnnnnnnnnnnnnnnnnnnnnnnnnnnnnnnnnnnnnnnnnnnnnnnnnnnnnnnnnnnnnnnnnnnnnnnnnnnnnnnnnnnnnnnnnnnnnnnnnnnnnnnnnnnnnnnnnnnnnnnnnnnnnnnnnnnnnnnnnnnnnnnnnnnnnnnnnnnnnnnnnnnnnnnnnnnnnnnnnnnnnnnnnnnnnnnnnnnnnnnnnnnnnnnnnnnnnnnnnnnnnnnnnnnnnnnnnnnnnnnnnnnnnnnnnnnnnnnnnnnnnnnnnnnnnnnnnnnnnnnnnnnnnnnnnnnnnnnnnnnnnnnnnnnnnnnnnnnnnnnnnnnnnnnnnnnnnnnnnnnnnnnnnnnnnnnnnnnnnnnnnnnnnnnnnnnnnnnnnnnnnnnnnnnnnnnnnnnnnnnnnnnnnnnnnnnnnnnnnnnnnnnnnnnnnnnnnnnnnnnnnnnnnnnnnnnnnnnnnnnnnnnnnnnnnnn

SEQ ID NO: 4201 - DNA, 972 bp, Xenorhabdus sp.
  unsure (1)..(972): unsure at all n locations
nnnnnnnnnnnnnnnnnnnnnnnnnnnnntgccctaaaggctgtcgcataatctgacagtggaagcctatgctgtacttaaaagagctgctgcggtctcgttaggaactgaaatcatcacaaccgtattgctatccaaggtggatacacgctaagaccatgcggagacactgctatgctgcttgcggggaatggaacagactgaggctgtgaaattaaaatacggacgacaaccatcacacaatccacactctactgtagcagaatcttacatcactaggggactaacatatagggcggaccggaccagcgatagcaacccataaagcatgtgtgcagggacgtttgtttgattcttaaccataaaggcaggggcggttgcgtctgtggatgatcagtcattgattgatccaacgcgtgatgcagcatacacataccagagagcctcatgaggaggattatgctacacgtaacgagctaactttaccactnnnnnnnnnnnnnnnnnnnnnnnnnnnnnnnnnnnnnnnnnnnnnnnnnnnnnnnnnnnnnnnnnnnnnnnnnnnnnnnnnnnnnnnnnnnnnnnnnnnnnnnnnnnnnnnnnnnnnnnnnnnnnnnnnnnnnnnnnnnnnnnnnnnnnnnnnnnnnnnnnnnnnnnnnnnnnnnnnnnnnnnnnnnnnnnnnnnnnnnnnnnnnnnnnnnnnnnnnnnnnnnnnnnnnnnnnnnnnnnnnnnnnnnnnnnnnnnnnnnnnnnnnnnnnnnnnnnnnnnnnnnnnnnnnnnnnnnnnnnnnnnnnnnnnnnnnnnnnnnnnnnnnnnnnnnnnnnnnnnnnnnnnnnnnnnnnnnnnnnnnnnnnnnnnnnnnnnnnnnnnnnnnnnnnnnnnnnnnnnnnnnnnnnnnnnnnnnnnnnnnnnnnnnnnnnnnnnnnnnnnnnnnnnnnnnnnnnnnnnnnnnnnnnnnnnnnnnnnnnnnn

SEQ ID NO: 4202 - DNA, 1372 bp, Xenorhabdus sp.
  unsure (1)..(1372): unsure at all n locations
nnnnnnnnnnnnnnnnnnnnnnnnnnnnnnnnnnnnnnnnnnnnnnnnnnnnnnnnnnnnnnnnncaggggaaaaatgccatacattggtatattttttttggcaccccactccaaagcaacaaaaggggnnnnnnnnnnnnnnnnnnnnnnnnnnnnnnnnnnnnnnnnnnnnnnnnnnnnnnnnnnnnnnnnnnnnnnnnnnnnnnnnnnnnnnnnnnnnnnnnnnnnnnnnnnnnnnnnnnnnnnnnnnnnnnnnnnnnnnnnnnnnnnnnnnnnnnnnnnnnnnnnnnnnnnnnnnnnnnnnnnnnnnnnnnnnnnnnnnnnnnnnnnnnnnnnnnnnnnnnnnnnnnnnnnnnnnnnnnnnnnnnnnnnnnnnnnnnnnnnnnnnnnnnnnnnnnnnnnnnnnnnnnnnnnnnnnnnnnnnnnnnnnnnnnnnnnnnnnnnnnnnnnnnnnnnnnnnnnnnnnnnnnnnnnnnnnnnnnnnnnnnnnnnnnnnnnnnnnnnnnnnnnnnnnnnnnnnnnnnnnnnnnnnnnnnnnnnnnnnnnnnnnnnnnnnnnnnnnnnnnnnnnnnnnnnnnnnnnnnnnnnnnnnnnnnnnnnnnnnnnnnnnnnnnnnnnnnnnnnnnnnnnnnnnnnnnnnnnnnnnnnnnnnnnnnnnnnnnnnnnnnnnnnnnnnnnnnnnnnnnnnnnnnnnnnnnnnnnnnnnnnnnnnnnnnnnnnnnnnnnnnnnnnnnnnnnnnnnnnnnnnnnnnnnnnnnnnnnnnnnnnnnnnnnnnnnnnnnnnnnnnnnnnnnnnnnnnnnnnnnnnnnnnnnnnnnnnnnnnnnnnnnnnnnnnnnnnnnnnnnnnnnnnnnnnnnnnnnnnnnnnnnnnnnnnnnnnnnnnnnnnnnnnnnnnnnnnnnnnnnnnnnnnnnnnnnnnnnnnnnnnnnnnnnnnnnnnnnnnnnnnnnnnnnnnnnnnnnnnnnnnnnnnnnnnnnnnnnnnnnnnnnnnnnnnnnnnnnnnnnnnnnnnnnnnnnnnnnnnnnnnnnnnnnnnnnnnnnnnnnnnnnnnnnnnnnnnnnnnnnnnnnnnnnnnnnnnnnnnnnnnnnnnnnnnnnnnnnnnnnnnnnnnnnnnnnnnnnnnnnnnnnnnnnnnnnnnnnnnnnnnnnnnnnnnnnnnnnnnnnnnnnnnnnnnnnnnnnnnnnnnnnnnnnnnnnnnnnnnnnnnnnnnnnnnnnnnnnnnnnnnnnnnnnnnnnnnnnnnnnnnnnnnnnnnnnnnnnnnnnnnnnnnnnnnnnnnnnnnnnnnnnnnnnnnnnnnnnnnnnnnnnnnnnnnnnnnnnnnnnnnnnnnnnnnnnnnnnnnnnnnnnnnnnnnnnnnnnnnnnnnnn

SEQ ID NO: 4203 - DNA, 932 bp, Xenorhabdus sp.
  unsure (1)..(932): unsure at all n locations
nnnnnnnnnnnnnnnnnnnnnnnnnnnnnnnnnnnnnatgtaatcgccggtgttgaccaaccggttggagaaggtgccgtcgaccggcgcgcgcaccttggtgaattcgagatcgcgctcggccttggcgagctgggtctgcaattcggcgagctgggcgcgggcctcggcctgctgcgccttggtgacatcgacgttgctctttgcggcgtcgtaagcaacctgcgccgaccgcaccgcggccgcgccttgatcacggcccgcttcggagacttcgaaggtggcgcgcgaggcacagcccttggtgctcagcgcctgctggcgatcgtaatcgagatcggcgcgcttcaaaccggcctgggcggagacgagctgcgcctgcgcctgctcgaccgagctttcggccgccgcgacctggcgaccgatgcgctcgatcgttgcctgctgggtcgggatccgcgtgcgcgcggcatnnnnnnnnnnnnnnnnnnnnnnnnnnnnnnnnnnnnnnnnnnnnnnnnnnnnnnnnnnnnnnnnnnnnnnnnnnnnnnnnnnnnnnnnnnnnnnnnnnnnnnnnnnnnnnnnnnnnnnnnnnnnnnnnnnnnnnnnnnnnnnnnnnnnnnnnnnnnnnnnnnnnnnnnnnnnnnnnnnnnnnnnnnnnnnnnnnnnnnnnnnnnnnnnnnnnnnnnnnnnnnnnnnnnnnnnnnnnnnnnnnnnnnnnnnnnnnnnnnnnnnnnnnnnnnnnnnnnnnnnnnnnnnnnnnnnnnnnnnnnnnnnnnnnnnnnnnnnnnnnnnnnnnnnnnnnnnnnnnnnnnnnnnnnnnnnnnnnnnnnnnnnnnnnnnnnnnnnnnnnnnnnnnnnnnnnnnnnnnnnnnnnnnnnnnnnnnnnnnnnnnnnnnnnnnnnnnnnnnnnnnnnnnnnnnnnnnnnnnn

SEQ ID NO: 4204 - DNA, 940 bp, Xenorhabdus sp.
  unsure (1)..(940): unsure at all n locations
nnnnnnnnnnnnnnnnnnnnnnnnnnnnnnnnnnnnnnnctctaaagacccgcgctcgcgagcaatgcggagagaatgctttcggcgccggcgcgattgtcggcgacaagcggaccaattttgtggccgctccggcacggacggatcacgccccagccggcgagcctgccgtcgcgtatcaacgcgcgcccgacatgtcccgaattgttgatccaggcgcgcaggaaggccgggcgcggggccggaaacaccgtggcgtcgtcggtctcgatctgcgccaggggcaaatttgtgagcgcgacgatgttggggtttgctgccgacggtgcggcaaccgtgccgccgtagcgcacattggcgtaagccagcgcgaagcctgacttctggtagttcgcctgctgcgccaccacgccgtcgagcccgatcacgcgcggacgcgcatgcgcgatnnnnnnnnnnnnnnnnnnnnnnnnnnnnnnnnnnnnnnnnnnnnnnnnnnnnnnnnnnnnnnnnnnnnnnnnnnnnnnnnnnnnnnnnnnnnnnnnnnnnnnnnnnnnnnnnnnnnnnnnnnnnnnnnnnnnnnnnnnnnnnnnnnnnnnnnnnnnnnnnnnnnnnnnnnnnnnnnnnnnnnnnnnnnnnnnnnnnnnnnnnnnnnnnnnnnnnnnnnnnnnnnnnnnnnnnnnnnnnnnnnnnnnnnnnnnnnnnnnnnnnnnnnnnnnnnnnnnnnnnnnnnnnnnnnnnnnnnnnnnnnnnnnnnnnnnnnnnnnnnnnnnnnnnnnnnnnnnnnnnnnnnnnnnnnnnnnnnnnnnnnnnnnnnnnnnnnnnnnnnnnnnnnnnnnnnnnnnnnnnnnnnnnnnnnnnnnnnnnnnnnnnnnnnnnnnnnnnnnnnnnnnnnnnnnnnnnnnnnnnnnnnnnnnnnnnnnnnnnnnnnnnnnnnnnn

SEQ ID NO: 4205 - DNA, 1836 bp, Xenorhabdus sp.
  unsure (1)..(1836): unsure at all n locations
nnnnnnnnnnnnnnnnnnnnnnnnnnnnnnnnnnnnnnnnnacacaccggcgtggccgtcgatttacagtcttgactggtaaaacaaatcatcctttctccctataatgattcgtattaagtgggcgtttttaaaaaaacnnnnnnnnnnnnnnnnnnnnnnnnnnnnnnnnnnnnnnnnnnnnnnnnnnnnnnnnnnnnnnnnnnnnnnnnnnnnnnnnnnnnnnnnnnnnnnnnnnnnnnnnnnnnnnnnnnnnnnnnnnnnnnnnnnnnnnnnnnnnnnnnnnnnnnnnnnnnnnnnnnnnnnnnnnnnnnnnnnnnnnnnnnnnnnnnnnnnnnnnnnnnnnnnnnnnnnnnnnnnnnnnnnnnnnnnnnnnnnnnnnnnnnnnnnnnnnnnnnnnnnnnnnnnnnnnnnnnnnnnnnnnnnnnnnnnnnnnnnnnnnnnnnnnnnnnnnnnnnnnnnnnnnnnnnnnnnnnnnnnnnnnnnnnnnnnnnnnnnnnnnnnnnnnnnnnnnnnnnnnnnnnnnnnnnnnnnnnnnnnnnnnnnnnnnnnnnnnnnnnnnnnnnnnnnnnnnnnnnnnnnnnnnnnnnnnnnnnnnnnnnnnnnnnnnnnnnnnnnnnnnnnnnnnnnnnnnnnnnnnnnnnnnnnnnnnnnnnnnnnnnnnnnnnnnnnnnnnnnnnnnnnnnnnnnnnnnnnnnnnnnnnnnnnnnnnnnnnnnnnnnnnnnnnnnnnnnnnnnnnnnnnnnnnnnnnnnnnnnnnnnnnnnnnnnnnnnnnnnnnnnnnnnnnnnnnnnnnnnnnnnnnnnnnnnnnnnnnnnnnnnnnnnnnnnnnnnnnnnnnnnnnnnnnnnnnnnnnnnnnnnnnnnnnnnnnnnnnnnnnnnnnnnnnnnnnnnnnnnnnnnnnnnnnnnnnnnnnnnnnnnnnnnnnnnnnnnnnnnnnnnnnnnnnnnnnnnnnnnnnnnnnnnnnnnnnnnnnnnnnnnnnnnnnnnnnnnnnnnnnnnnnnnnnnnnnnnnnnnnnnnnnnnnnnnnnnnnnnnnnnnnnnnnnnnnnnnnnnnnnnnnnnnnnnnnnnnnnnnnnnnnnnnnnnnnnnnnnnnnnnnnnnnnnnnnnnnnnnnnnnnnnnnnnnnnnnnnnnnnnnnnnnnnnnnnnnnnnnnnnnnnnnnnnnnnnnnnnnnnnnnnnnnnnnnnnnnnnnnnnnnnnnnnnnnnnnnnnnnnnnnnnnnnnnnnnnnnnnnnnnnnnnnnnnnnnnnnnnnnnnnnnnnnnnnnnnnnnnnnnnnnnnnnnnnnnnnnnnnnnnnnnnnnnnnnnnnnnnnnnnnnnnnnnnnnnnnnnnnnnnnnnnnnnnnnnnnnnnnnnnnnnnnnnnnnnnnnnnnnnnnnnnnnnnnnnnnnnnnnnnnnnnnnnnnnnnnnnnnnnnnnnnnnnnnnnnnnnnnnnnnnnnnnnnnnnnnnnnnnnnnnnnnnnnnnnnnnnnnnnnnnnnnnnnnnnnnnnnnnnnnnnnnnnnnnnnnnnnnnnnnnnnnnnnnnnnnnnnnnnnnnnnnnnnnnnnnnnnnnnnnnnnnnnnnnnnnnnnnnnnnnnnnnnnnnnnnnnnnnnnnnnnnnnnnnnnnnnnnnnnnnnnnnnnnnnnnnnnnnnnnnnnnnnnnnnnnnnnnnnnnnnnnnnnnnnnnnnnnnnnnnnnnnnnnnnnnnnnnnnnnnnnnnnnnnnnnnnnnnnnnnnnnnnnnnnnnnnnnnnnnnnnnnnnnnnnnnnnnnnnnnnnnnnnnnnnnnnnnnnnnnnnnnnnnnnnnnnnnnnnnnnnnnnnnnnnnnnnnnnnnnnnnnnnnnnnnnn

SEQ ID NO: 4206 - DNA, 1090 bp, Xenorhabdus sp.
  unsure (1)..(1090): unsure at all n locations
nnnnnnnnnnnnnnnnnnnnnnnnnnnnnnnnnnnnnnnnnnnnnnnnnnnnnnnnnnnnnnnnnnnnnnnnnnnnnnnnnnnnnnnnnnnnnnnnnnnnnnnnnnnnnnnnnnnnnnnnnnnnnnnnnnnnnnnnnnnnnnnnnnnnnnnnnnnaaaaaaaaaaaaaaaaggaaaaaaaaaaaaaaaaaaaaaaaaaaaaaagaaaaaaaaaaaaaaaaaaaaaaaaaaaaaaaaaaaaaaaaaaaaaaaaagaagaaaaaaaaaaaacaaaaagaaaaaaaaaaaaaaaaataaaaaaaagaaaaaaaaaaagaaaaaaaaaaacaaaaaaaaaaaaaaaagaaaaaaaaaagaaaaaaaaaaataaaagaaaaacacagaaaaggaaaaaaannnnnnnnnnnnnnnnnnnnnnnnnnnnnnnnnnnnnnnnnnnnnnnnnnnnnnnnnnnnnnnnnnnnnnnnnnnnnnnnnnnnnnnnnnnnnnnnnnnnnnnnnnnnnnnnnnnnnnnnnnnnnnnnnnnnnnnnnnnnnnnnnnnnnnnnnnnnnnnnnnnnnnnnnnnnnnnnnnnnnnnnnnnnnnnnnnnnnnnnnnnnnnnnnnnnnnnnnnnnnnnnnnnnnnnnnnnnnnnnnnnnnnnnnnnnnnnnnnnnnnnnnnnnnnnnnnnnnnnnnnnnnnnnnnnnnnnnnnnnnnnnnnnnnnnnnnnnnnnnnnnnnnnnnnnnnnnnnnnnnnnnnnnnnnnnnnnnnnnnnnnnnnnnnnnnnnnnnnnnnnnnnnnnnnnnnnnnnnnnnnnnnnnnnnnnnnnnnnnnnnnnnnnnnnnnnnnnnnnnnnnnnnnnnnnnnnnnnnnnnnnnnnnnnnnnnnnnnnnnnnnnnnnnnnnnnnnnnnnnnnnnnnnnnnnnnnnnnnnnnnnnnnnnnnnnnnnnnnnnnnnnnnnnnnnnnnnnnnnnnnnnnnnnnnnnnnnnnnnnnnnnnnnnnnnnnnnnnnnnnnnnnnnnnnnnnnnnnnnnnnnnnnnnnnnnnnnnnnnnnnnnnnnnnnnnnnnnnnnnnnnnnnnnnnnnnnnnnnnnnnnnnnnnnnnnnnn

SEQ ID NO: 4207 - DNA, 1022 bp, Xenorhabdus sp.
  unsure (1)..(1022): unsure at all n locations
nnnnnnnnnnnnnnnnnnnnnnnnnnnnnnnnnnnnnnnntcgctatatcgaccgcaatgtcgatgtgctggtgctgcgactgaggcgcaagatcgagataaaccccgatctgccgcgccatatcaagacccggcgcagcaagggatatgtgctccacaccgatgagggcgagctttccccgtgatcagccgttccttcctttcctcgattgcctttcggctgccctttgcgatcgtctttacctgcgtcctcgtcttcagcctgtcagccatcgccatttatggcctgcagcgcgcccgcgatgagatggcagcctatggcttgcaggccttttccagtctcgccaaggcgtcgctggtctcgcggcaggtctccgatctcgtttccagcgcacctttcctgatgaatgccgcctcgccctatcgcgtttccagcgagagccgctccgtggtccagcaggtcgacctgctgcttgagatgaccgggccgggcagcggcgaacgggccgcgcgcggctttgcgagcgaacgcatcgttgaactgctccagcttatccgggcgcagacgctcgatctcgccaaggatgccgatgccgcgcaggcgcacaaggcggaagcggcggcggcattgggcgnnnnnnnnnnnnnnnnnnnnnnnnnnnnnnnnnnnnnnnnnnnnnnnnnnnnnnnnnnnnnnnnnnnnnnnnnnnnnnnnnnnnnnnnnnnnnnnnnnnnnnnnnnnnnnnnnnnnnnnnnnnnnnnnnnnnnnnnnnnnnnnnnnnnnnnnnnnnnnnnnnnnnnnnnnnnnnnnnnnnnnnnnnnnnnnnnnnnnnnnnnnnnnnnnnnnnnnnnnnnnnnnnnnnnnnnnnnnnnnnnnnnnnnnnnnnnnnnnnnnnnnnnnnnnnnnnnnnnnnnnnnnnnnnnnnnnnnnnnnnnnnnnnnnnnnnnnnnnnnnnnnnnnnnnnnnnnnnnnnnnnnnnnnnnnnnnnnnnnnnnnnnnnnnnnnnnnnnnnnnnnnnnnn

SEQ ID NO: 4208 - DNA, 975 bp, Xenorhabdus sp.
  unsure (1)..(975): unsure at all n locations
nnnnnnnnnnnnnnnnnnnnnnnnnnnnnnccatccatgtgctctaaaggatccgcctatactactgaataaatgctttgaccaaactgatgttcagtggcaagggagactttctcgcgatgtgactttaggctctgtatcatatgaacgcttgctgtgtgcgagtactcaagatagggctgcagcggaggaatacagcgtctttatgaaggggtgcaaataaatcggacactgtcctaaccgtcatacagccttgcggatattgatgcggtaacagcattgacaacttatggttccgcggacatatctgaaacttcacgacatgttctatgatgcccctgacggaaatgactcgattatcaaaccattctttcaatgcataaaatacaatggataagaacagctgttcttactcaacgaacatctggatggagtagacactgctcaatatactcnnnnnnnnnnnnnnnnnnnnnnnnnnnnnnnnnnnnnnnnnnnnnnnnnnnnnnnnnnnnnnnnnnnnnnnnnnnnnnnnnnnnnnnnnnnnnnnnnnnnnnnnnnnnnnnnnnnnnnnnnnnnnnnnnnnnnnnnnnnnnnnnnnnnnnnnnnnnnnnnnnnnnnnnnnnnnnnnnnnnnnnnnnnnnnnnnnnnnnnnnnnnnnnnnnnnnnnnnnnnnnnnnnnnnnnnnnnnnnnnnnnnnnnnnnnnnnnnnnnnnnnnnnnnnnnnnnnnnnnnnnnnnnnnnnnnnnnnnnnnnnnnnnnnnnnnnnnnnnnnnnnnnnnnnnnnnnnnnnnnnnnnnnnnnnnnnnnnnnnnnnnnnnnnnnnnnnnnnnnnnnnnnnnnnnnnnnnnnnnnnnnnnnnnnnnnnnnnnnnnnnnnnnnnnnnnnnnnnnnnnnnnnnnnnnnnnnnnnnnnnnnnnnnnnnnnnnnnnnnnnnnnnnnnnnnnnnnnnnnnnnnnnnnnnnnnnnnnnnnn

SEQ ID NO: 4209 - DNA, 951 bp, Xenorhabdus sp.
  unsure (1)..(951): unsure at all n locations
nnnnnnnnnnnnnnnnnnnnnnnnnnnnnnnnnnnnnnnnnnnngcgatgaccttgatcgccgcgaccgtttcattaaagttcagccgcttcgcccagtcgcgctccgtgattctgggtggaatcgtttccgggttcgtgctttatgtagtaagggtgctcntaagggcattcnggagtggtggtgttgtccctcccaccgtcgcggtctgggttccagttatcgtggcgttggctttgggggcaactattctgcttcatcaggaggacggctagtggcggtatatgaccgcgggaatatcaggcggctttggacggcccttctgacaggtgccgctgtgtgcgcgtatttggcatccagcccggtcgctttcggccaggatggtttgcttgcgtcggcaagccaagacgattcgaaactcctgcttacagcaaatgaactgacctataatcgcgattcccagcgcgtcatcgcgaagggcgtggttcgcatgaaatattccggctaccgcatgnnnnnnnnnnnnnnnnnnnnnnnnnnnnnnnnnnnnnnnnnnnnnnnnnnnnnnnnnnnnnnnnnnnnnnnnnnnnnnnnnnnnnnnnnnnnnnnnnnnnnnnnnnnnnnnnnnnnnnnnnnnnnnnnnnnnnnnnnnnnnnnnnnnnnnnnnnnnnnnnnnnnnnnnnnnnnnnnnnnnnnnnnnnnnnnnnnnnnnnnnnnnnnnnnnnnnnnnnnnnnnnnnnnnnnnnnnnnnnnnnnnnnnnnnnnnnnnnnnnnnnnnnnnnnnnnnnnnnnnnnnnnnnnnnnnnnnnnnnnnnnnnnnnnnnnnnnnnnnnnnnnnnnnnnnnnnnnnnnnnnnnnnnnnnnnnnnnnnnnnnnnnnnnnnnnnnnnnnnnnnnnnnnnnnnnnnnnnnnnnnnnnnnnnnnnnnnnnnnnnnnnnnnnnnnnnnnnnn

SEQ ID NO: 4210 - DNA, 954 bp, Xenorhabdus sp.
  unsure (1)..(954): unsure at all n locations
nnnnnnnnnnnnnnnnnnnnnnnnnnnnnnnnnnnnnnnnaaattggttgcagcatggtcatagttaatacctaccgatttctatcatatcccctaaattctctttctatcacacataatgcactctatgaattgtgcccaacaattagggacggtatctccatatagtccaccacctccgctcatcagacattaaccctcataaatgctttactaaaattgaaaaaataaaactctgaatattcaacattacccagtcgcccttatacgcttttttgcggcaaataacattactgtttttcctcacccacacactctagagaaagtaaaacatgctgaagatcacattattacacgaccggtttacatccaacnnnnnnnnnnnnnnnnnnnnnnnnnnnnnnnnnnnnnnnnnnnnnnnnnnnnnnnnnnnnnnnnnnnnnnnnnnnnnnnnnnnnnnnnnnnnnnnnnnnnnnnnnnnnnnnnnnnnnnnnnnnnnnnnnnnnnnnnnnnnnnnnnnnnnnnnnnnnnnnnnnnnnnnnnnnnnnnnnnnnnnnnnnnnnnnnnnnnnnnnnnnnnnnnnnnnnnnnnnnnnnnnnnnnnnnnnnnnnnnnnnnnnnnnnnnnnnnnnnnnnnnnnnnnnnnnnnnnnnnnnnnnnnnnnnnnnnnnnnnnnnnnnnnnnnnnnnnnnnnnnnnnnnnnnnnnnnnnnnnnnnnnnnnnnnnnnnnnnnnnnnnnnnnnnnnnnnnnnnnnnnnnnnnnnnnnnnnnnnnnnnnnnnnnnnnnnnnnnnnnnnnnnnnnnnnnnnnnnnnnnnnnnnnnnnnnnnnnnnnnnnnnnnnnnnnnnnnnnnnnnnnnnnnnnnnnnnnnnnnnnnnnnnnnnnnnnnnnnnnnnnnnnnnnnnnnnnnnnnnnnnnnnnnnnnnnnnnnnnnnnnnnnnnnnnnnnnnnnnnn

SEQ ID NO: 4211 - DNA, 679 bp, Xenorhabdus sp.
  unsure (1)..(679): unsure at all n locations
nnnnnnnnnnnnnnnnnnnnnnnnnnnnnnnnnnnnnnnnnnnnnnnnnnnnnnnnnnnnnnnnnnnnnnnnnnnnnnnnnnnnacctggcttggtattcagtcttccttatccacccgggctgattcttatatgccttgcccctagcctacaccccgaatggacgaaccacttattgccccggacgtagggccggatggcccacaattttcctgtgactaacactgtcgcgttcggattcaaattggctgcgacaaccaccgggagttaaatgaccgcaccggttgctaccctcagctcagacacgcgtgatcttgccgattaatgggattaaaaggcattcctcctatcggtcaccctgttgtgggggacatatgatactgcgtcccctatctgactgttattggatggcgggcttcttactccaatactattgggcctaaacgcctgccgactgaccaaacccatatgtctatacgatcaccaacccactgaagagacacgatctactgaaccgcgctnnnnnnnnnnnnnnnnnnnnnnnnnnnnnnnnnnnnnnnnnnnnnnnnnnnnnnnnnnnnnnnnnnnnnnnnnnnnnnnnnnnnnnnnnnnnnnnnnnnnnnnnnnnnnnnnnnnnnnnnnnnnnnnnnnnnnnnnnnnnnnnnnnnnnnnnnnnnnn

SEQ ID NO: 4212 - DNA, 702 bp, Xenorhabdus sp.
  unsure (1)..(702): unsure at all n locations
nnnnnnnnnnnnnnnnnnnnnnnnnnnnnnnntgtgctctaaagaacactttgcgcaccatgctattattgggcctggctcgcaggaactcatgccaaattctgtcaggaaggaacgcgcccatgtacatacgagctgcacccttcagaggcaatatcggcccctgtacataaaatgtattggctactggataacaagatgaaccttgattccacccgctgagcctgccgtactctaggcccagaattctaaaaagttgaatctgaagccaacgtttccgtacagcaaggaataatgaaccggctttttgagctgtacaaaccataacgaactactgcatttatttactgactcactaaacattcaaactgaggacaggcttatactctaaaatgatgaacaccatcaattactattgcacaatattaaattaaatagcaagggatcgcctgaacagacatcacctctgaagacgtaatgcagtatttggagatagggatgaaaatgctggagaagaaaacgggaacataacacaatggcactatgtcaattgctaaaaacactgtactagcaatgaggaaaacgcagtttccttcaaactgttctgtaagcgagaatgagcgaaggcagattctcttatcaaagctccacccatggcacaatcatgttatctgnnnnnnnnnnnnnnnnnnnnnnnnnnnn

SEQ ID NO: 4213 - DNA, 809 bp, Xenorhabdus sp.
  unsure (1)..(809): unsure at all n locations
nnnnnnnnnnnnnnnnnnnnnnnnnnagtgtgctctaaagaatcgttatctctttgaagatattaacgagacgcagttagccataacggtgacttgaggaaacatagcactattgtgatttttggactaattcctgttactataaagtacattacttttattatcactttccattattattgatctggaacgggatttgtctagcttaaaacttgaattgtgtgagtttctatccaacaaggtcgaactaatcattcccatacgctgaggctattgatgaagtgaactgttacatgaaacatgaaccttactttgtcaaatgatcatggagacagaggttagtgttggggctgtatttggttcatctccaatctcgcatatatgatcgctcagcgatactattcgcgctggttcaataagaacccaactctctactatatgatggaggctgaatgcnnnnnnnnnnnnnnnnnnnnnnnnnnnnnnnnnnnnnnnnnnnnnnnnnnnnnnnnnnnnnnnnnnnnnnnnnnnnnnnnnnnnnnnnnnnnnnnnnnnnnnnnnnnnnnnnnnnnnnnnnnnnnnnnnnnnnnnnnnnnnnnnnnnnnnnnnnnnnnnnnnnnnnnnnnnnnnnnnnnnnnnnnnnnnnnnnnnnnnnnnnnnnnnnnnnnnnnnnnnnnnnnnnnnnnnnnnnnnnnnnnnnnnnnnnnnnnnnnnnnnnnnnnnnnnnnnnnnnnnnnnnnnnnnnnnnnnnnnnnnnnnnnnnnnnnnnnnnnnnnnnnnnnnnnnnnnnnnnnnnnnnnnnnnnnnnn

SEQ ID NO: 4214 - DNA, 1064 bp, Xenorhabdus sp.
  unsure (1)..(1064): unsure at all n locations
atgcacccaatacgaaggatcccatgtttgacaaatttaagctggcattcgttagcatattttaacccttcggatggtacatcgaaatattgatctatattaatccgttggagagaatctaccattaatacatggctccatcttgcctacgggacgatgctgcccgtccctgacaaccattttggcgatttccgtgctcgtccaaatgaagctgataattaatggggatactgcttcgatagagctgcccattatctaatagagcacgatgtttgtctctataaccgcccgatgaaactgtcttcgagccagaaaaatatnnnnnnnnnnnnnnnnnnnnnnnnnnnnnnnnnnnnnnnnnnnnnnnnnnnnnnnnnnnnnnnnnnnnnnnnnnnnnnnnnnnnnnnnnnnnnnnnnnnnnnnnnnnnnnnnnnnnnnnnnnnnnnnnnnnnnnnnnnnnnnnnnnnnnnnnnnnnnnnnnnnnnnnnnnnnnnnnnnnnnnnnnnnnnnnnnnnnnnnnnnnnnnnnnnnnnnnnnnnnnnnnnnnnnnnnnnnnnnnnnnnnnnnnnnnnnnnnnnnnnnnnnnnnnnnnnnnnnnnnnnnnnnnnnnnnnnnnnnnnnnnnnnnnnnnnnnnnnnnnnnnnnnnnnnnnnnnnnnnnnnnnnnnnnnnnnnnnnnnnnnnnnnnnnnnnnnnnnnnnnnnnnnnnnnnnnnnnnnnnnnnnnnnnnnnnnnnnnnnnnnnnnnnnnnnnnnnnnnnnnnnnnnnnnnnnnnnnnnnnnnnnnnnnnnnnnnnnnnnnnnnnnnnnnnnnnnnnnnnnnnnnnnnnnnnnnnnnnnnnnnnnnnnnnnnnnnnnnnnnnnnnnnnnnnnnnnnnnnnnnnnnnnnnnnnnnnnnnnnnnnnnnnnnnnnnnnnnnnnnnnnnnnnnnnnnnnnnnnnnnnnnnnnnnnnnnnnnnnnnnnnnnnnnnnnnnnnnnnnnnnnnnnnnnnnnnnnnnnnnnnnnnnnnnnnnnnnnnnnnnnnnnnnnnnnnnnnnnnnnnnnnnnnnnnnnnnnnnnnnnnnn

SEQ ID NO: 4215 - DNA, 889 bp, Xenorhabdus sp.
  unsure (1)..(889): unsure at all n locations
nnnnnnnnnnnnnnnnnnnnnnnnnnnnnnnnnnnnnnnnnnnnnnnnnnnnnnnnnnnnnnncccctccagttgcccttgccagttacacagtacaacaaagcgtgctgcgatctaatcctatgcatacactgatggagtgcatgacggctggcatttgcccggtttgattaatcacaccaaactggtgcatatccaggatctatatatgcaggggcttaagttagaacgacttcctattataaacatgataatcaccgcattgtttgtcgtgagtatccgatggattgccaccgccagtccattgaatgccatactcacacaggatctgctgtatgttgtgttcaaatgcagtacccaatnnnnnnnnnnnnnnnnnnnnnnnnnnnnnnnnnnnnnnnnnnnnnnnnnnnnnnnnnnnnnnnnnnnnnnnnnnnnnnnnnnnnnnnnnnnnnnnnnnnnnnnnnnnnnnnnnnnnnnnnnnnnnnnnnnnnnnnnnnnnnnnnnnnnnnnnnnnnnnnnnnnnnnnnnnnnnnnnnnnnnnnnnnnnnnnnnnnnnnnnnnnnnnnnnnnnnnnnnnnnnnnnnnnnnnnnnnnnnnnnnnnnnnnnnnnnnnnnnnnnnnnnnnnnnnnnnnnnnnnnnnnnnnnnnnnnnnnnnnnnnnnnnnnnnnnnnnnnnnnnnnnnnnnnnnnnnnnnnnnnnnnnnnnnnnnnnnnnnnnnnnnnnnnnnnnnnnnnnnnnnnnnnnnnnnnnnnnnnnnnnnnnnnnnnnnnnnnnnnnnnnnnnnnnnnnnnnnnnnnnnnnnnnnnnnnnnnnnnnnnnnnnnnnnnnnnnnnnnnnnnnnnnnnnnnnnnnnnnnnnnnnnnnnnnnnnnnnnnnnnnnnnnnn

SEQ ID NO: 4216 - DNA, 909 bp, Xenorhabdus sp.
  unsure (1)..(909): unsure at all n locations
nnnnnnnnnnnnnnnnnnnnnnnnnnnnnnnnnnnnnnntaagggcttgggccaaacgacctctttttggtcgtttaatgtctaacttcctcacttacttactatgaaaataaaacaatgaatgtttcttattcagaaggcttcctagtgatactcctatctgaaatgaagatcaagcaaagaaagccgtaaaaaagttataatttgacactatgccggtgtaagtgaatacagttaataaagccagctgtagcttgaaagatggcgggtatttattcctgcgctcttgctgctaatcatgctgccttctgtactccctaccctgcttccattcaacgaggtaacacaaccatttgaatatcatatctggtgatatcataatcaacatctgatacagcaaggccaaagccgtaaggataactgctaatttgctattgcttgattaaccatttagtgccctgatatttcgatattccactaaaaagtgtcacaatagccccatattactcctgaggcggtataagacaagtttttttannnnnnnnnnnnnnnnnnnnnnnnnnnnnnnnnnnnnnnnnnnnnnnnnnnnnnnnnnnnnnnnnnnnnnnnnnnnnnnnnnnnnnnnnnnnnnnnnnnnnnnnnnnnnnnnnnnnnnnnnnnnnnnnnnnnnnnnnnnnnnnnnnnnnnnnnnnnnnnnnnnnnnnnnnnnnnnnnnnnnnnnnnnnnnnnnnnnnnnnnnnnnnnnnnnnnnnnnnnnnnnnnnnnnnnnnnnnnnnnnnnnnnnnnnnnnnnnnnnnnnnnnnnnnnnnnnnnnnnnnnnnnnnnnnnnnnnnnnnnnnnnnnnnnnnnnnnnnnnnnnnnnnnnnnnnnnnnnnnnnnnnnnnnnnnnnnnnnnnnnnnnnnnnnnnn

SEQ ID NO: 4217 - DNA, 874 bp, Xenorhabdus sp.
  unsure (1)..(874): unsure at all n locations
nnnnnnnnnnnnnnnnnnnnnnnnnnnnnnnnnccctaagcaatgcggcaaatcccgcaccatggcgtggatcaggtaatcggaactgccgctggtctggtaaccgcccacaacttcgggaatggaagccacatggtgttcgaaggtcgtcagcgcttccttgatctgccgctccagcgtgacggagatgaagacgcccatattgccgagcagccggttctcatcgaacacggcggtatagccgcgaatgatgccttcctcttccagcttgcgcacgcggcgcagcgtcggcgtgaaggaaagaccgatacgggccgccagatcccgccagctcacccgcccgtcatcgccgagcacatgcagaatcttctggtcgaaactgtcgagctcaatcatggatcatttgctctatgatatgactaattggtggatcaaagatatcgtcaatcaaaaaactgtcaatcaaaatagctttgaaatgaannnnnnnnnnnnnnnnnnnnnnnnnnnnnnnnnnnnnnnnnnnnnnnnnnnnnnnnnnnnnnnnnnnnnnnnnnnnnnnnnnnnnnnnnnnnnnnnnnnnnnnnnnnnnnnnnnnnnnnnnnnnnnnnnnnnnnnnnnnnnnnnnnnnnnnnnnnnnnnnnnnnnnnnnnnnnnnnnnnnnnnnnnnnnnnnnnnnnnnnnnnnnnnnnnnnnnnnnnnnnnnnnnnnnnnnnnnnnnnnnnnnnnnnnnnnnnnnnnnnnnnnnnnnnnnnnnnnnnnnnnnnnnnnnnnnnnnnnnnnnnnnnnnnnnnnnnnnnnnnnnnnnnnnnnnnnnnnnnnnnnnnnnnnnnnnnnnnnnnnnnnnnnnnnnnnnnnnnnnnnnnnnnnnnnn

SEQ ID NO: 4218 - DNA, 915 bp, Xenorhabdus sp.
  unsure (1)..(915): unsure at all n locations
nnnnnnnnnnnnnnnnnnnnnnnnnnnnnnnnnnnnnnntaaagaatttactacactggacactcaaaacttctccgttatgcctccacattaacaatcctggctggcctattgcaggaacccaccacattaggggctggccgttctatatcccggggctgttcctaatcgaggatcaatgacataccctcttattgcatatataacatttttagactgatccatataacttctacggatccatagtcttcgccaaccgtgcctctgctggtaaccataagcgatacaatctgaggtatctggccttcgtactccggtaaatattgactggctgctccattctccaaatggcataggatgggtgcctcttacttccatcaacgtnnnnnnnnnnnnnnnnnnnnnnnnnnnnnnnnnnnnnnnnnnnnnnnnnnnnnnnnnnnnnnnnnnnnnnnnnnnnnnnnnnnnnnnnnnnnnnnnnnnnnnnnnnnnnnnnnnnnnnnnnnnnnnnnnnnnnnnnnnnnnnnnnnnnnnnnnnnnnnnnnnnnnnnnnnnnnnnnnnnnnnnnnnnnnnnnnnnnnnnnnnnnnnnnnnnnnnnnnnnnnnnnnnnnnnnnnnnnnnnnnnnnnnnnnnnnnnnnnnnnnnnnnnnnnnnnnnnnnnnnnnnnnnnnnnnnnnnnnnnnnnnnnnnnnnnnnnnnnnnnnnnnnnnnnnnnnnnnnnnnnnnnnnnnnnnnnnnnnnnnnnnnnnnnnnnnnnnnnnnnnnnnnnnnnnnnnnnnnnnnnnnnnnnnnnnnnnnnnnnnnnnnnnnnnnnnnnnnnnnnnnnnnnnnnnnnnnnnnnnnnnnnnnnnnnnnnnnnnnnnnnnnnnnnnnnnnnnnnnnnnnnnnnnnnnnnnnnnnnnnnnnnnnnnnnn

SEQ ID NO: 4219 - DNA, 978 bp, Xenorhabdus sp.
  unsure (1)..(978): unsure at all n locations
nnnnnnnnnnnnnnnnnnnnnnnnnnnnnnnnnnnnnnnnnnnnnnnnnnnnnnnnnnnnnnnnnnnnnnnnnnnnnnnnnnnnnnnnnnnnnnnnnnnnnnnnnnnnnnnnnnnnnnnnnnnnnnnnnnnnnnnnnnnnnnnnnnnnnnnnnnnnnnnnnnnnnnnnnnnnnnnnnnnnnnnnnnnnnnnnnnnnnnnnnnnnnnnnnnnnnnnnnnnnnnnnnnnnnnnnnnnnnnnnnnnnnnnnnnnnnnnnnnnnnnnnnnnnnnnnnnnnnnnnnnnnnnnnnnnnnnnnnnnnnnnnnnnnnnnntcaggaaataacgcactgtctcagcatcgtaatatgccagcacatcacggatggtaaagaagttgttgagagatttcgacatcttctctttatccaccattaccataccggaatgcatccagtaattcacataagggccagcgtgagcacaggtagattgtgcaatttcattttcatgatgcgggaacattaaatctnnnnnnnnnnnnnnnnnnnnnnnnnnnnnnnnnnnnnnnnnnnnnnnnnnnnnnnnnnnnnnnnnnnnnnnnnnnnnnnnnnnnnnnnnnnnnnnnnnnnnnnnnnnnnnnnnnnnnnnnnnnnnnnnnnnnnnnnnnnnnnnnnnnnnnnnnnnnnnnnnnnnnnnnnnnnnnnnnnnnnnnnnnnnnnnnnnnnnnnnnnnnnnnnnnnnnnnnnnnnnnnnnnnnnnnnnnnnnnnnnnnnnnnnnnnnnnnnnnnnnnnnnnnnnnnnnnnnnnnnnnnnnnnnnnnnnnnnnnnnnnnnnnnnnnnnnnnnnnnnnnnnnnnnnnnnnnnnnnnnnnnnnnnnnnnnnnnnnnnnnnnnnnnnnnnnnnnnnnnnnnnnnnnnnnnnnnnnnnnnnnnnnnnnnnnnnnnnnnnnnnnnnnnnnnnnnnnnnnnnnnnnnnnnnnnnnnnnnnnnnnnnnnnnn

SEQ ID NO: 4220 - DNA, 1170 bp, Xenorhabdus sp.
  unsure (1)..(1170): unsure at all n locations
nnnnnnnnnnnnnnnnnnnnnnnnnnnnnnnnnnaaaggattattaccaaacggccatattgaataccttatccccaaccattaatcattgtcaagcaacctcattttccgtacccaactaaacagaaaacccgggcgccctgtgggttacaccgggggcccaacacgccgtctttactgatcagtaacataacaaccctaaggagctggtaacctatctgaccacagaatgtacactgtccatccacaatctgatcgaatatacctcttcccgtttgccgaaatatatgcagcctgccannnnnnnnnnnnnnnnnnnnnnnnnnnnnnnnnnnnnnnnnnnnnnnnnnnnnnnnnnnnnnnnnnnnnnnnnnnnnnnnnnnnnnnnnnnnnnnnnnnnnnnnnnnnnnnnnnnnnnnnnnnnnnnnnnnnnnnnnnnnnnnnnnnnnnnnnnnnnnnnnnnnnnnnnnnnnnnnnnnnnnnnnnnnnnnnnnnnnnnnnnnnnnnnnnnnnnnnnnnnnnnnnnnnnnnnnnnnnnnnnnnnnnnnnnnnnnnnnnnnnnnnnnnnnnnnnnnnnnnnnnnnnnnnnnnnnnnnnnnnnnnnnnnnnnnnnnnnnnnnnnnnnnnnnnnnnnnnnnnnnnnnnnnnnnnnnnnnnnnnnnnnnnnnnnnnnnnnnnnnnnnnnnnnnnnnnnnnnnnnnnnnnnnnnnnnnnnnnnnnnnnnnnnnnnnnnnnnnnnnnnnnnnnnnnnnnnnnnnnnnnnnnnnnnnnnnnnnnnnnnnnnnnnnnnnnnnnnnnnnnnnnnnnnnnnnnnnnnnnnnnnnnnnnnnnnnnnnnnnnnnnnnnnnnnnnnnnnnnnnnnnnnnnnnnnnnnnnnnnnnnnnnnnnnnnnnnnnnnnnnnnnnnnnnnnnnnnnnnnnnnnnnnnnnnnnnnnnnnnnnnnnnnnnnnnnnnnnnnnnnnnnnnnnnnnnnnnnnnnnnnnnnnnnnnnnnnnnnnnnnnnnnnnnnnnnnnnnnnnnnnnnnnnnnnnnnnnnnnnnnnnnnnnnnnnnnnnnnnnnnnnnnnnnnnnnnnnnnnnnnnnnnnnnnnnnnnnnnnnnnnnnnnnnnnnnnnnnnnnnnnnnnnnnnnnnnnnnnnnnnnnnnnnnnnnnnnnnnnnnnnnnnnnnnn

SEQ ID NO: 4221 - DNA, 1014 bp, Xenorhabdus sp.
  unsure (1)..(1014): unsure at all n locations
nnnnnnnnnnnnnnnnnnnnnnnnnnnnnnnnnnnnnnnnnnnnnnnnnnnnnnnnnnnnnnnnnnnnnnnnnnnnnnnnnnnnnnnnnnnnnnnnnnnnnnnnnnnnnnnnnnnnnnnnnnnnnnnnnnnnnnnnnnnnnnnnnnnnnnnnnnnnnnnnnnnnnnnnnnnnnnnnnnnnnnnnnnnnnnnnnnnnnnnnnnnnnnnnnnnnnnnnnnnnnnnnnnnnnnnnnnnnnnnnnnnnnnnnnnnnnnnnnnnnnnnnnnnnnnnnnnnnnnnnnnnnnnnnnnnnnnnnnnnnnnnnnnnnnnnnnnnnnnnnnnnnnnnnnnnnnnnnnnnnnnnnnnnnnnnnnnnnnnnnnnnnnngatgttttgactgccttaacgcgtcaagtcccgccttacgcactcgttgcttctcaaccgctagttgtccagccagcccgttatttcagccgtcgtcggatgtattggatgggctggctcggaggtgtgatcgcgttaagggcattatggtggggactctcagcatcattacagcaactcggtcatcaattgcttaaccaaggataacccctcgatgcgaatcttnnnnnnnnnnnnnnnnnnnnnnnnnnnnnnnnnnnnnnnnnnnnnnnnnnnnnnnnnnnnnnnnnnnnnnnnnnnnnnnnnnnnnnnnnnnnnnnnnnnnnnnnnnnnnnnnnnnnnnnnnnnnnnnnnnnnnnnnnnnnnnnnnnnnnnnnnnnnnnnnnnnnnnnnnnnnnnnnnnnnnnnnnnnnnnnnnnnnnnnnnnnnnnnnnnnnnnnnnnnnnnnnnnnnnnnnnnnnnnnnnnnnnnnnnnnnnnnnnnnnnnnnnnnnnnnnnnnnnnnnnnnnnnnnnnnnnnnnnnnnnnnnnnnnnnnnnnnnnnnnnnnnnnnnnnnnnnnnnnnnnnnnnnnnnnnnnnnnnnnnnnnnnnnnnnnnnnnnnnnnnnnnnnnnnnnnnnnnnnnnnnnnnnnnnnnnnnnnnnnnnnn

SEQ ID NO: 4222 - DNA, 921 bp, Xenorhabdus sp.
  unsure (1)..(921): unsure at all n locations
nnnnnnnnnnnnnnnnnnnnnnnnnnnntctaagctttctcgcaagcaaggcggatcagccgcgggttttcgtcaaacgtctccacgatgacatgtctcggtttgttgccctgaaccatgtggcggaggccagccgcaaggcaggcgaactgggcattgccccgcggctcatccatgccgctcccgagggcggcgtcctggtattcgaagcgcttggcgaggaatgggcgtgggggcatgccgatgtccttcgccgcccgcgggttctcgaaaatcttctgacggcaaaacgcagcttccatcaggctgagaggcttggcgaaacgcgcagcgttttcgagctcgttgccgcctaccggcagcttgccgaaggagcggatgtgatcttgccagcaccggtattcaccgtctctgctgccgtcgagcgcattgccggcgccatcggcgccgcaggtgtcgatacggtcccgtgccacgcggacggcatctcgtcgaacgtcatggtcggaccggacgacggagttcggctggtcgatttcgagtgggcgcgccaggcggaccccgcgtacgatatcggaaccgtgctggccgnnnnnnnnnnnnnnnnnnnnnnnnnnnnnnnnnnnnnnnnnnnnnnnnnnnnnnnnnnnnnnnnnnnnnnnnnnnnnnnnnnnnnnnnnnnnnnnnnnnnnnnnnnnnnnnnnnnnnnnnnnnnnnnnnnnnnnnnnnnnnnnnnnnnnnnnnnnnnnnnnnnnnnnnnnnnnnnnnnnnnnnnnnnnnnnnnnnnnnnnnnnnnnnnnnnnnnnnnnnnnnnnnnnnnnnnnnnnnnnnnnnnnnnnnnnnnnnnnnnnnnnnnnnnnnnnnnnnnnnnnnnnnnnnnnnnnnnnnnnnnnnnnnnnnnnnnnnnnnnnnnnnnnnnnn

SEQ ID NO: 4223 - DNA, 980 bp, Xenorhabdus sp.
  unsure (1)..(980): unsure at all n locations
nnnnnnnnnnnnnnnnnnnnnnnnnnnnnnnnnnnnnnnnngtgctctaaagtatgcgaaattcatccgatagctgggtgagttcatctatgtcgaacagctcgcggaaagccgcagttctacttcctatcgcggcgcgatcccgctccgaaataagcaactgctcgaagggcaatcccaactcgcacacctcgtcgggccaggattcgatgaaggttgctcgccatttttcgtgcagaccaagcatttatatctcgtcggcctttttaagattgtagaagaactcataaagagacggggcggcgaaacccaggccccgcgcgttatttcctgtgccgaagggatccgacgcttgttcccacagccatacccggttgtcggtcttatcctgaccattcatcaacaaatacgaattcccaccgtcagcggtgccgaagaatatcattggtaaggtgaactggtcaggccacgtggagctgcttatgaacatgtcgtatcgatcataaaaccnnnnnnnnnnnnnnnnnnnnnnnnnnnnnnnnnnnnnnnnnnnnnnnnnnnnnnnnnnnnnnnnnnnnnnnnnnnnnnnnnnnnnnnnnnnnnnnnnnnnnnnnnnnnnnnnnnnnnnnnnnnnnnnnnnnnnnnnnnnnnnnnnnnnnnnnnnnnnnnnnnnnnnnnnnnnnnnnnnnnnnnnnnnnnnnnnnnnnnnnnnnnnnnnnnnnnnnnnnnnnnnnnnnnnnnnnnnnnnnnnnnnnnnnnnnnnnnnnnnnnnnnnnnnnnnnnnnnnnnnnnnnnnnnnnnnnnnnnnnnnnnnnnnnnnnnnnnnnnnnnnnnnnnnnnnnnnnnnnnnnnnnnnnnnnnnnnnnnnnnnnnnnnnnnnnnnnnnnnnnnnnnnnnnnnnnnnnnnnnnnnnnnnnnnnnnnnnnnnnnnnnnnnnnnnnnnnnnnnnnnnnnnnnnnnnnnnnnnnnnnnnnnnnnnn

SEQ ID NO: 4224 - DNA, 977 bp, Xenorhabdus sp.
  unsure (1)..(977): unsure at all n locations
nnnnnnnnnnnnnnnnnnnnntctaaggacctgtgccggatttcatctatgccaaggatctggaaggccgctttcttttcgcaaaccgcgccatcgtgaccgaaaacggcttcgacagcgtcgaggagcggattggtctcaccgattatgacattcacggcgaggctgcgcggcgtgccggcattcccgataccgaagcgcgggtcatgcgcaccggcgagccggatctcggttatgaggaacgcgccatgcgcggcgatatcgaccgctggctgatgatgtcgcgcgtgccgctgagggacaagagcggcaggatcatcggcgtggtcggcgcttcccgggacataacccagaaaaaggcctcggaaaggctgctgcaggcgcaggcgcgtattctggaaatgattgttgcggcggcgcggatcgaggactttctcgaggagttcgtcaaggccattgaaaaccttgcgaccgggcttgcctgcgctgtccgggtatttgatgcggcgtggggggagccctccgactatgcctcgccggcattggcgcagcatgcgggtctgacagcgcgcatttccaccgtcggcgatccnnnnnnnnnnnnnnnnnnnnnnnnnnnnnnnnnnnnnnnnnnnnnnnnnnnnnnnnnnnnnnnnnnnnnnnnnnnnnnnnnnnnnnnnnnnnnnnnnnnnnnnnnnnnnnnnnnnnnnnnnnnnnnnnnnnnnnnnnnnnnnnnnnnnnnnnnnnnnnnnnnnnnnnnnnnnnnnnnnnnnnnnnnnnnnnnnnnnnnnnnnnnnnnnnnnnnnnnnnnnnnnnnnnnnnnnnnnnnnnnnnnnnnnnnnnnnnnnnnnnnnnnnnnnnnnnnnnnnnnnnnnnnnnnnnnnnnnnnnnnnnnnnnnnnnnnnnnnnnnnnnnnnnnnnnnnnnnnnnnnnnnnnnnnnnnnnnnnnnnnnnnnnnnnnnnnnnnnnnnnnnnnn

SEQ ID NO: 4225 - DNA, 712 bp, Xenorhabdus sp.
  unsure (1)..(712): unsure at all n locations
nnnnnnnnnnnnnnnnnnnnnnnnnnnttgtgctctaaagaatctccagtcaaaaatttgtgagcgaatgcgcaaatttgagggctggtctttccctggcgcccgcttccctgcgctgattcatcaaatgacggaaagcgccggggactcggggtccaaatcggcaaattgcaaatacaataaaagtacacaattggattaagtagtaatattgcaacagatcaatagtttaaaatataataatttcgttatttattttcaataaacggaatttattactcaattaaaataatcgacaatgcgaattttatttattacgaaagaatattattgccataaaaaacggcgcgcacgccgcgccagcacccggaacgatcaggaaacaggtcgggattgttgggaaagtccggccaggaatatttccgaaggcggataagcctccggaaaaagacccgccaaagcgggcctattgcggatcgatggatgagccggtggggaaggtcntcatcttccccagcatgtcgccgatcgctttcggctccaccgagcgggtgaaataataaccctgtccataagggcaaccggcggcccacagaaatnnnnnnnnnnnnnnnnnnnnnnnnnnnnnnnnnnnnnnnnnnnnnnnnnnnnnnnnnnnnnnnnnnnnnnnnnnnnnnnnnnnnnnnnnnnnnnnnnnnnnnnnnnnnnnnnn

SEQ ID NO: 4226 - DNA, 1018 bp, Xenorhabdus sp.
  unsure (1)..(1018): unsure at all n locations
nnnnnnnnnnnnnnnnnnnnnnnnnnnnnnnntgtgctctaaagatccctgtgctgaccatatctggccggccataaacggaattacctggttgtcacccatggtttaaggacgtactaaaagcgcatagccgctgtctgaccggcataactgtaaatgacatgcccccttaaccggctgtttgtgattagataacatccacgcttcctgaatgactacctgaccatgctagcgcccatgaatagcgggtactgtgacatccaacatgtcggcattttttcccagatgctgatcatagaccaatctctgcggaaatgccgtgcgcacctgaggacaccaaattggctgtaactgctgatccgccgagctaccccataaatgactcggatcctggctgcaactaaccttccctgttagataaactatacccggagatnnnnnnnnnnnnnnnnnnnnnnnnnnnnnnnnnnnnnnnnnnnnnnnnnnnnnnnnnnnnnnnnnnnnnnnnnnnnnnnnnnnnnnnnnnnnnnnnnnnnnnnnnnnnnnnnnnnnnnnnnnnnnnnnnnnnnnnnnnnnnnnnnnnnnnnnnnnnnnnnnnnnnnnnnnnnnnnnnnnnnnnnnnnnnnnnnnnnnnnnnnnnnnnnnnnnnnnnnnnnnnnnnnnnnnnnnnnnnnnnnnnnnnnnnnnnnnnnnnnnnnnnnnnnnnnnnnnnnnnnnnnnnnnnnnnnnnnnnnnnnnnnnnnnnnnnnnnnnnnnnnnnnnnnnnnnnnnnnnnnnnnnnnnnnnnnnnnnnnnnnnnnnnnnnnnnnnnnnnnnnnnnnnnnnnnnnnnnnnnnnnnnnnnnnnnnnnnnnnnnnnnnnnnnnnnnnnnnnnnnnnnnnnnnnnnnnnnnnnnnnnnnnnnnnnnnnnnnnnnnnnnnnnnnnnnnnnnnnnnnnnnnnnnnnnnnnnnnnnnnnnnnnnnnnnnnnnnnnnnnnnnnnnnnnnnnnnnnnnnnnnnnnnnnnnnnnnnnnnnnnn

SEQ ID NO: 4227 - DNA, 984 bp, Xenorhabdus sp.
  unsure (1)..(984): unsure at all n locations
nnnnnnnnnnnnnnnnnnnnnnnnnnnnnnnnnnnnnnnnnagtgtcctctaaggggcgccttaccgacaccggccaatgatgccggcttgattgcccaaaccttgcaggcagccggttttgatgtgatcggtgcgcgcgaccttgaccagaacggattgcgtgacgcgatgagggactttctgacgaaagcgaatgcatcgggacccgataccgtcgtttttgtctatctggccggctatggggtgcaatatcagggtgataattatttcgtaccggtcgatgcgcagatcaagcaagccacggatgtgcccgtcgaagccctgcggataaccgatttcacgagatcgctggccagtcttgacaatcgcggcagcatcgttgtgcttgatgcggcaagagccaatccgtttgtgcagtccagtcagccgctggctggtggtctggcgcttgtcgatccggacgccaatcagctgannnnnnnnnnnnnnnnnnnnnnnnnnnnnnnnnnnnnnnnnnnnnnnnnnnnnnnnnnnnnnnnnnnnnnnnnnnnnnnnnnnnnnnnnnnnnnnnnnnnnnnnnnnnnnnnnnnnnnnnnnnnnnnnnnnnnnnnnnnnnnnnnnnnnnnnnnnnnnnnnnnnnnnnnnnnnnnnnnnnnnnnnnnnnnnnnnnnnnnnnnnnnnnnnnnnnnnnnnnnnnnnnnnnnnnnnnnnnnnnnnnnnnnnnnnnnnnnnnnnnnnnnnnnnnnnnnnnnnnnnnnnnnnnnnnnnnnnnnnnnnnnnnnnnnnnnnnnnnnnnnnnnnnnnnnnnnnnnnnnnnnnnnnnnnnnnnnnnnnnnnnnnnnnnnnnnnnnnnnnnnnnnnnnnnnnnnnnnnnnnnnnnnnnnnnnnnnnnnnnnnnnnnnnnnnnnnnnnnnnnnnnnnnnnnnnnnnnnnnnnnnnnnnnnnnnnnnnnnnnnnnnnnnnnnnnnnnnnnnnnnnnnnnn

SEQ ID NO: 4228 - DNA, 1076 bp, Xenorhabdus sp.
  unsure (1)..(1076): unsure at all n locations
nnnnnnnnnnnnnnnnnnnnnnnnnnnnnnnnnnnngtgctctaaaggcactatcaacggcaatgacagcgccgccgcccgaaagagtgccatggcagatgagaccctgtatgccatgcaccgcgccgcgaacatcagcgacagatcctccactcgtggccagccgctgccgcagtccttccaaaacagcttctttttccatgcccgttgcctaggaacatgccggtaaatccggagcaccgcacttcttcctttcagcagcctgcggtttcttcgattgctgctcgcccaccatcggctttgactggggcggggcctgcggtctgggtttcggttccgcctctggttttggtgcgtgtgcatgcgccggcgcagccacatgtggctccttgggcagagacggcggcggagcggcctcatggaagggcagcggaacaacatgaccctgatgaccgagccgaggctcgccattatcgggaataccggactttgccggccgcttgtcattcattaccggtgtggcgggctttnnnnnnnnnnnnnnnnnnnnnnnnnnnnnnnnnnnnnnnnnnnnnnnnnnnnnnnnnnnnnnnnnnnnnnnnnnnnnnnnnnnnnnnnnnnnnnnnnnnnnnnnnnnnnnnnnnnnnnnnnnnnnnnnnnnnnnnnnnnnnnnnnnnnnnnnnnnnnnnnnnnnnnnnnnnnnnnnnnnnnnnnnnnnnnnnnnnnnnnnnnnnnnnnnnnnnnnnnnnnnnnnnnnnnnnnnnnnnnnnnnnnnnnnnnnnnnnnnnnnnnnnnnnnnnnnnnnnnnnnnnnnnnnnnnnnnnnnnnnnnnnnnnnnnnnnnnnnnnnnnnnnnnnnnnnnnnnnnnnnnnnnnnnnnnnnnnnnnnnnnnnnnnnnnnnnnnnnnnnnnnnnnnnnnnnnnnnnnnnnnnnnnnnnnnnnnnnnnnnnnnnnnnnnnnnnnnnnnnnnnnnnnnnnnnnnnnnnnnnnnnnnnnnnnnnnnnnnnnnnnnnnnnnnnnnnnnnnnnnnnnnnnnnnnnnnnnnnnnnnnnnnnnnnnnnnnnnnnnnnnnnnnn

SEQ ID NO: 4229 - DNA, 730 bp, Xenorhabdus sp.
  unsure (1)..(730): unsure at all n locations
nnnnnnnnnnnnnnnnnnnnnnnnnnnnnnnnnnnnnnnnnnnnnnntaatgaagagcgtggatgggcacgcgacgtgtgctattctgccggcatgctttatgacgtttggttacgggtgggctgtatcaccaggggttagtaagtcgttccggctgatgactgagcctctgtttaaggcggattagcgctggttggcagtgggactgggttttggcacgctggcgctattgatgcaacgaactatgcactgcctgtgcgtatcaaggtgggtgacttgactactggccgtcgtggccgttgaggtacctatgnnnnnnnnnnnnnnnnnnnnnnnnnnnnnnnnnnnnnnnnnnnnnnnnnnnnnnnnnnnnnnnnnnnnnnnnnnnnnnnnnnnnnnnnnnnnnnnnnnnnnnnnnnnnnnnnnnnnnnnnnnnnnnnnnnnnnnnnnnnnnnnnnnnnnnnnnnnnnnnnnnnnnnnnnnnnnnnnnnnnnnnnnnnnnnnnnnnnnnnnnnnnnnnnnnnnnnnnnnnnnnnnnnnnnnnnnnnnnnnnnnnnnnnnnnnnnnnnnnnnnnnnnnnnnnnnnnnnnnnnnnnnnnnnnnnnnnnnnnnnnnnnnnnnnnnnnnnnnnnnnnnnnnnnnnnnnnnnnnnnnnnnnnnnnnnnnnnnnnnnnnnnnnnnnnnnnnnnnnnnnnnnnnnnnnnnnnnnnnnnnnnnnnnnnnnnnnnnn

SEQ ID NO: 4230 - DNA, 674 bp, Xenorhabdus sp.
  unsure (1)..(674): unsure at all n locations
nnnnnnnnnnnnnnnnnnnnnnnnnnnnnnnnnnnnnnnnnnnnnnnnnnnnnnnnnnnnnnnnnnnnnnnnnnnnnnnnnnnnnnnnnnnnnnnnnnnnnnnnnnnnnnnnnnnnnnnnnnnnnnnnnnnnnnnnnnnnnnnnnnnnnnnnnnnnnnnnnnnnnnnnnnnnnnnngaaagatcccggcgttaacccccatgtgtgtgccatgacatcaggactttagggccatatgagtgaaatctatgagacgcgtactctgttaatgcacctattagcctcattggaatacgacctatgtattgcgcgattataatcgctaacgatnnnnnnnnnnnnnnnnnnnnnnnnnnnnnnnnnnnnnnnnnnnnnnnnnnnnnnnnnnnnnnnnnnnnnnnnnnnnnnnnnnnnnnnnnnnnnnnnnnnnnnnnnnnnnnnnnnnnnnnnnnnnnnnnnnnnnnnnnnnnnnnnnnnnnnnnnnnnnnnnnnnnnnnnnnnnnnnnnnnnnnnnnnnnnnnnnnnnnnnnnnnnnnnnnnnnnnnnnnnnnnnnnnnnnnnnnnnnnnnnnnnnnnnnnnnnnnnnnnnnnnnnnnnnnnnnnnnnnnnnnnnnnnnnnnnnnnnnnnnnnnnnnnnnnnnnnnnnnnnnnnnnnnnnnnnnnnnnnnnnnnnnn

SEQ ID NO: 4231 - DNA, 965 bp, Xenorhabdus sp.
  unsure (1)..(965): unsure at all n locations
nnnnnnnnnnnnnnnnnnnnnnnnnnnnnnnnnnnnnnnnnnnnngtgctttaatgccggtagacacctttccttatttacgtagcgcagattatgacctatcttgttaatacactactgtgtgtgaacatgggggttgccttttttactgcggtcatcaaaaacgatgctgatactcctcctattagtcctctgattcaataaacacactnnnnnnnnnnnnnnnnnnnnnnnnnnnnnnnnnnnnnnnnnnnnnnnnnnnnnnnnnnnnnnnnnnnnnnnnnnnnnnnnnnnnnnnnnnnnnnnnnnnnnnnnnnnnnnnnnnnnnnnnnnnnnnnnnnnnnnnnnnnnnnnnnnnnnnnnnnnnnnnnnnnnnnnnnnnnnnnnnnnnnnnnnnnnnnnnnnnnnnnnnnnnnnnnnnnnnnnnnnnnnnnnnnnnnnnnnnnnnnnnnnnnnnnnnnnnnnnnnnnnnnnnnnnnnnnnnnnnnnnnnnnnnnnnnnnnnnnnnnnnnnnnnnnnnnnnnnnnnnnnnnnnnnnnnnnnnnnnnnnnnnnnnnnnnnnnnnnnnnnnnnnnnnnnnnnnnnnnnnnnnnnnnnnnnnnnnnnnnnnnnnnnnnnnnnnnnnnnnnnnnnnnnnnnnnnnnnnnnnnnnnnnnnnnnnnnnnnnnnnnnnnnnnnnnnnnnnnnnnnnnnnnnnnnnnnnnnnnnnnnnnnnnnnnnnnnnnnnnnnnnnnnnnnnnnnnnnnnnnnnnnnnnnnnnnnnnnnnnnnnnnnnnnnnnnnnnnnnnnnnnnnnnnnnnnnnnnnnnnnnnnnnnnnnnnnnnnnnnnnnnnnnnnnnnnnnnnnnnnnnnnnnnnnnnnnnnnnnnnnnnnnnnnnnnnnnnnnnnnnnnnnnnnnnnnnnnnnnnnnnnnnnnnnnnnnnnnnnnnnnnnnnnnnnnnnnnnnnnnnnnnnnnnnnnnnnnn

SEQ ID NO: 4232 - DNA, 907 bp, Xenorhabdus sp.
  unsure (1)..(907): unsure at all n locations
nnnnnnnnnnnnnnnnnnnnnnnnnnnnnnnnnnnnnnnnnnnnnnnnnnnnnnnnnnnnnnnnnnnnnnnnnnnnnnnnnnnnnnnnnnnnnnnnnnnnnnnnnnnnnnnnnnnnnnnnnnnnnnnnnnnnnnnnnnnnnnnnnnnnnnnnnnnnnnnnnnnnnnnnnnnnnnnnnnnnnnnnnnnnnnnnnnnnnngtgcggctgtttaaccgtctatcatactggataggagatgctttttgcatgaccagacactcaatgaataggtggggccgagcagtgcacggacttagttatctcagaattagaaatttagtgagactnnnnnnnnnnnnnnnnnnnnnnnnnnnnnnnnnnnnnnnnnnnnnnnnnnnnnnnnnnnnnnnnnnnnnnnnnnnnnnnnnnnnnnnnnnnnnnnnnnnnnnnnnnnnnnnnnnnnnnnnnnnnnnnnnnnnnnnnnnnnnnnnnnnnnnnnnnnnnnnnnnnnnnnnnnnnnnnnnnnnnnnnnnnnnnnnnnnnnnnnnnnnnnnnnnnnnnnnnnnnnnnnnnnnnnnnnnnnnnnnnnnnnnnnnnnnnnnnnnnnnnnnnnnnnnnnnnnnnnnnnnnnnnnnnnnnnnnnnnnnnnnnnnnnnnnnnnnnnnnnnnnnnnnnnnnnnnnnnnnnnnnnnnnnnnnnnnnnnnnnnnnnnnnnnnnnnnnnnnnnnnnnnnnnnnnnnnnnnnnnnnnnnnnnnnnnnnnnnnnnnnnnnnnnnnnnnnnnnnnnnnnnnnnnnnnnnnnnnnnnnnnnnnnnnnnnnnnnnnnnnnnnnnnnnnnnnnnnnnnnnnnnnnnnnnnnnnnnnnnnnnnnnnnnnnnnnnnnnnnnnnnnnnnnnnnnnnnnnnnnnnnnnnnnnnnnnnnnnnnnn

SEQ ID NO: 4233 - DNA, 947 bp, Xenorhabdus sp.
  unsure (1)..(947): unsure at all n locations
nnnnnnnnnnnnnnnnnnnnnnnnnnnnnnnnnnncttccttgtaactcgatgaaatgcgtcgtggaggactgcgcggcagcaccggccccggcagacgttttgtcttttttctggggcgcaactaccttaaatccgcgcgaattgccagccttctacagcaattcgcggaagagtgcctagcggtttccgcccggaattgctttaaatgacgcgatcaggcgttttgcgggctatttatccgcaatgggacgccacagagaagacggaaaagaagagaagatgcgcgcaagcaaagagacaatgtcgccatggtggacgcccgatgtccacgccgaccgccgcgcttttctcattggccgcaacgcgatccagtcggcattccgcagctatttcgcccgtgccgattttcttgaggtcgataccgccaccctgcagatttcgcccggcaatgaggcgcatctgcacgcctttgccactgagggtctgacgccgggcggcgatgccgtaccgctctatctccatacctcgccggaattcgnnnnnnnnnnnnnnnnnnnnnnnnnnnnnnnnnnnnnnnnnnnnnnnnnnnnnnnnnnnnnnnnnnnnnnnnnnnnnnnnnnnnnnnnnnnnnnnnnnnnnnnnnnnnnnnnnnnnnnnnnnnnnnnnnnnnnnnnnnnnnnnnnnnnnnnnnnnnnnnnnnnnnnnnnnnnnnnnnnnnnnnnnnnnnnnnnnnnnnnnnnnnnnnnnnnnnnnnnnnnnnnnnnnnnnnnnnnnnnnnnnnnnnnnnnnnnnnnnnnnnnnnnnnnnnnnnnnnnnnnnnnnnnnnnnnnnnnnnnnnnnnnnnnnnnnnnnnnnnnnnnnnnnnnnnnnnnnnnnnnnnnnnnnnnnnnnnnnnnnnnnnnnnnnnnnnnnnnnnnnnnnnnnnnnnnnnnnnnnnnnnnnnnn

SEQ ID NO: 4234 - DNA, 886 bp, Xenorhabdus sp.
  unsure (1)..(886): unsure at all n locations
nnnnnnnnnnnnnnnnnnnnnnnnnnnnnnnngtgctctaaagacacgtggatttaaatccagcattccaggattcaagaccaaggattgcgttgatgttgatatgttttgacatgacacactccctgtattggtgttgatccggaatcaggagactcgttctccagttccacactgataatccagaccagcactaaaatcaatgctgattgttataggtagaatatttttctttatgatgacaggagaggggcggaattgtgaaatttttgttttcttgccccgtcacctcgaaaagcccggcgtcgcgggctttttatgctttttttaagcgtcgccagatgccgccggggggtagatgtgatcgtttccgttgaaatcggaaacggaataacagccatcgattgtctttttggccgcatttctgccaatagccgccttgccgtggccgcccggaatgtcgaggacataggtgggctggcacaggccggagacatgtccgcgcaaggcggaaacgattcgctgtccctcttcgatcgtcaaccggaaatggctggtgccgggcgcgaagatcggatgatgcnnnnnnnnnnnnnnnnnnnnnnnnnnnnnnnnnnnnnnnnnnnnnnnnnnnnnnnnnnnnnnnnnnnnnnnnnnnnnnnnnnnnnnnnnnnnnnnnnnnnnnnnnnnnnnnnnnnnnnnnnnnnnnnnnnnnnnnnnnnnnnnnnnnnnnnnnnnnnnnnnnnnnnnnnnnnnnnnnnnnnnnnnnnnnnnnnnnnnnnnnnnnnnnnnnnnnnnnnnnnnnnnnnnnnnnnnnnnnnnnnnnnnnnnnnnnnnnnnnnnnnnnnnnnnnnnnnnnnnnnnnnnnnnnnnnnnnnnnnnnnnn

SEQ ID NO: 4235 - DNA, 978 bp, Xenorhabdus sp.
  unsure (1)..(978): unsure at all n locations
nnnnnnnnnnnnnnnnnnnnnnnnnnnnnnnnnnnnnnnnnnnnnnnnnnnnnnnnnnnnnnnnnnnnggagatacaacctaccaaccaggcaaccggcagtggtgatagccttacgcataataccccatcagtcagtacgtaccnnnnnnnnnnnnnnnnnnnnnnnnnnnnnnnnnnnnnnnnnnnnnnnnnnnnnnnnnnnnnnnnnnnnnnnnnnnnnnnnnnnnnnnnnnnnnnnnnnnnnnnnnnnnnnnnnnnnnnnnnnnnnnnnnnnnnnnnnnnnnnnnnnnnnnnnnnnnnnnnnnnnnnnnnnnnnnnnnnnnnnnnnnnnnnnnnnnnnnnnnnnnnnnnnnnnnnnnnnnnnnnnnnnnnnnnnnnnnnnnnnnnnnnnnnnnnnnnnnnnnnnnnnnnnnnnnnnnnnnnnnnnnnnnnnnnnnnnnnnnnnnnnnnnnnnnnnnnnnnnnnnnnnnnnnnnnnnnnnnnnnnnnnnnnnnnnnnnnnnnnnnnnnnnnnnnnnnnnnnnnnnnnnnnnnnnnnnnnnnnnnnnnnnnnnnnnnnnnnnnnnnnnnnnnnnnnnnnnnnnnnnnnnnnnnnnnnnnnnnnnnnnnnnnnnnnnnnnnnnnnnnnnnnnnnnnnnnnnnnnnnnnnnnnnnnnnnnnnnnnnnnnnnnnnnnnnnnnnnnnnnnnnnnnnnnnnnnnnnnnnnnnnnnnnnnnnnnnnnnnnnnnnnnnnnnnnnnnnnnnnnnnnnnnnnnnnnnnnnnnnnnnnnnnnnnnnnnnnnnnnnnnnnnnnnnnnnnnnnnnnnnnnnnnnnnnnnnnnnnnnnnnnnnnnnnnnnnnnnnnnnnnnnnnnnnnnnnnnnnnnnnnnnnnnnnnnnnnnnnnnnnnnnnnnnnnnnnnnnnnnnnnnnnnnnnnnnnnnnnnnnnnnnnnnnnnnnnnnnnnnnnnnnnnnnnnnnnnnnnnnnnnnnnnnnnnn

SEQ ID NO: 4236 - DNA, 602 bp, Xenorhabdus sp.
  unsure (1)..(602): unsure at all n locations
nnnnnnnnnnnnnnnnnnnnnnnnnnnnnnnnnnnnnnnnggcgcgttacagtctgactgggaaaacaactttttttctaatgagtcgattaattggtagccaggtaacctgattaatgaatcgcaacgcgcgggagaggcgttggtattggcgctttcgttctcgtactgactcgtgcgctcggcgtcggctgcgcagcggatcagctcactaaaggcgtatacgtatcacaaatcagggataacgcagaaagaacatgtgacaaagccgcaaaggccagaaccgaaaaggcggttgctggctttttcataggctcgccccctgcgagcatacaaaaatgacgctaagtcagagggggaacccgacaggactataaagataccagcgttcccctgaagccctcgtgcgctctctgttcaccctgcgttaccgatactgccgccttttccttgggaagcggggctttttatgctaacctgaggtatttatnnnnnnnnnnnnnnnnnnnnnnnnnnnnnnnnnnnnnnnnnnnnnnnnnnnnnnnnnnnnnnnnnnnnnnnnnnnnnnnnnnnnnnnnnnnnnnnnnnnnnnnnnnnnnnnn

SEQ ID NO: 4237 - DNA, 915 bp, Xenorhabdus sp.
  unsure (1)..(915): unsure at all n locations
nnnnnnnnnnnnnnnnnnnnnnnnnnnnnnnnnnnnccactcgggtatctgcatatggatgaagctctttgacgtatattcttgctggtcggtgtcggactaattgctctgggtctgtagcagcctggaaaaggtgctgagacggctgcttcctttggagctgcggcgtcccccccaacatttgcttcatcgagttctgcaaattctatgacccgtatgacagcggctgatgcaacatagcttattggcatcagcctgattgtgggaactctgaccactaatagatctgcttccagtggcgactggaacaaccatagcgagcctgtaaaaactgaaaaacaggctcacactccgggaatacccgcagctgcagatactcccactcgggatctccctcaacgcattttggcggacatcattccatccgcatattcatgcgacgattcgagatctggttctttctttaannnnnnnnnnnnnnnnnnnnnnnnnnnnnnnnnnnnnnnnnnnnnnnnnnnnnnnnnnnnnnnnnnnnnnnnnnnnnnnnnnnnnnnnnnnnnnnnnnnnnnnnnnnnnnnnnnnnnnnnnnnnnnnnnnnnnnnnnnnnnnnnnnnnnnnnnnnnnnnnnnnnnnnnnnnnnnnnnnnnnnnnnnnnnnnnnnnnnnnnnnnnnnnnnnnnnnnnnnnnnnnnnnnnnnnnnnnnnnnnnnnnnnnnnnnnnnnnnnnnnnnnnnnnnnnnnnnnnnnnnnnnnnnnnnnnnnnnnnnnnnnnnnnnnnnnnnnnnnnnnnnnnnnnnnnnnnnnnnnnnnnnnnnnnnnnnnnnnnnnnnnnnnnnnnnnnnnnnnnnnnnnnnnnnnnnnnnnnnnnnnnnnnnnnnnnnnnnnnnnnnnnnnnnnnnnnnnnnnnnnnnnnnnn

SEQ ID NO: 4238 - DNA, 1056 bp, Xenorhabdus sp.
  unsure (1)..(1056): unsure at all n locations
nnnnnnnnnnnnnnnnnnnnnnnnnnnnnnnnnnnnnnnnnnnnnnnnnnnnnnnnnnnnnnnnnnnnnnnnnnnnnnnnnnnnnnnnnnnnnnnnnnnnnnnaaaccactggggccgaaaataacatcatcggggtttaatcccccccgggggggaccccccccccccccagattctaccctacccaaaannnnnnnnnnnnnnnnnnnnnnnnnnnnnnnnnnnnnnnnnnnnnnnnnnnnnnnnnnnnnnnnnnnnnnnnnnnnnnnnnnnnnnnnnnnnnnnnnnnnnnnnnnnnnnnnnnnnnnnnnnnnnnnnnnnnnnnnnnnnnnnnnnnnnnnnnnnnnnnnnnnnnnnnnnnnnnnnnnnnnnnnnnnnnnnnnnnnnnnnnnnnnnnnnnnnnnnnnnnnnnnnnnnnnnnnnnnnnnnnnnnnnnnnnnnnnnnnnnnnnnnnnnnnnnnnnnnnnnnnnnnnnnnnnnnnnnnnnnnnnnnnnnnnnnnnnnnnnnnnnnnnnnnnnnnnnnnnnnnnnnnnnnnnnnnnnnnnnnnnnnnnnnnnnnnnnnnnnnnnnnnnnnnnnnnnnnnnnnnnnnnnnnnnnnnnnnnnnnnnnnnnnnnnnnnnnnnnnnnnnnnnnnnnnnnnnnnnnnnnnnnnnnnnnnnnnnnnnnnnnnnnnnnnnnnnnnnnnnnnnnnnnnnnnnnnnnnnnnnnnnnnnnnnnnnnnnnnnnnnnnnnnnnnnnnnnnnnnnnnnnnnnnnnnnnnnnnnnnnnnnnnnnnnnnnnnnnnnnnnnnnnnnnnnnnnnnnnnnnnnnnnnnnnnnnnnnnnnnnnnnnnnnnnnnnnnnnnnnnnnnnnnnnnnnnnnnnnnnnnnnnnnnnnnnnnnnnnnnnnnnnnnnnnnnnnnnnnnnnnnnnnnnnnnnnnnnnnnnnnnnnnnnnnnnnnnnnnnnnnnnnnnnnnnnnnnnnnnnnnnnnnnnnnnnnnnnnnnnnnnnnnnnnnnnnnnnnnnnnnnnnnnnnnnnnnnnnnnnnnnnnnnnnnnnnnnnnnnnnnnnnnn

SEQ ID NO: 4239 - DNA, 670 bp, Xenorhabdus sp.
  unsure (1)..(670): unsure at all n locations
nnnnnnnnnnnnnnnnnnnnnnnnnnnnnnnnnngctctaaagagtttgagtcccagtgcagagacatgccataactgcctcttcgccttgtgacagaccggagttgaaatctacagcatgactaactcaaacggggagagaaaacaggccgccgcctgaatgaacagccgacctatactgaacatttacacagcatgacgcgtgacagatagaatataacggagattctagtgaacagcccacgcgaaaacgccacctgcgataacgtgcctcaatcactgatctggctcaacactagcctaaagacttaccgnnnnnnnnnnnnnnnnnnnnnnnnnnnnnnnnnnnnnnnnnnnnnnnnnnnnnnnnnnnnnnnnnnnnnnnnnnnnnnnnnnnnnnnnnnnnnnnnnnnnnnnnnnnnnnnnnnnnnnnnnnnnnnnnnnnnnnnnnnnnnnnnnnnnnnnnnnnnnnnnnnnnnnnnnnnnnnnnnnnnnnnnnnnnnnnnnnnnnnnnnnnnnnnnnnnnnnnnnnnnnnnnnnnnnnnnnnnnnnnnnnnnnnnnnnnnnnnnnnnnnnnnnnnnnnnnnnnnnnnnnnnnnnnnnnnnnnnnnnnnnnnnnnnnnnnnnnnnnnnnnnnnnnnnnnnnnnnnnnnnnnnnnnnnnnnnnnnn

SEQ ID NO: 4240 - DNA, 909 bp, Xenorhabdus sp.
  unsure (1)..(909): unsure at all n locations
nnnnnnnnnnnnnnnnnnnnnnnnnnnnnnnnnnnnnnnnnnnnnnnnnnnnnnnnnnnnnnnnnnnnnnnnnnnnnnnnnnnnnnnnnnnnnnnnnnnnnnnnnnnnnnnnnnnnnnnnnnnnnnnnnnnnnnnnnnnnnnnnnnnnnnnnnnnnnnnnnnnnnnnnnnnnnnnnnnnnnnnnnnnnnnnnnnnnnnnnnnnnnnnnnnnnnnnnnnnnnnnnnnnnnnnnnnnnnnnnnnnnnnnnnnnnnnnnnnnnnnnnnnngagtttgagtattcaacattgccgtgaagaccttattcccttgttccgcggattttagccttcctgttgttgctaacccacaaacgctggagtaatttggcgatgctgaacattatttggtggcacaagagaattccattgcactgcgatctcccctcgttgannnnnnnnnnnnnnnnnnnnnnnnnnnnnnnnnnnnnnnnnnnnnnnnnnnnnnnnnnnnnnnnnnnnnnnnnnnnnnnnnnnnnnnnnnnnnnnnnnnnnnnnnnnnnnnnnnnnnnnnnnnnnnnnnnnnnnnnnnnnnnnnnnnnnnnnnnnnnnnnnnnnnnnnnnnnnnnnnnnnnnnnnnnnnnnnnnnnnnnnnnnnnnnnnnnnnnnnnnnnnnnnnnnnnnnnnnnnnnnnnnnnnnnnnnnnnnnnnnnnnnnnnnnnnnnnnnnnnnnnnnnnnnnnnnnnnnnnnnnnnnnnnnnnnnnnnnnnnnnnnnnnnnnnnnnnnnnnnnnnnnnnnnnnnnnnnnnnnnnnnnnnnnnnnnnnnnnnnnnnnnnnnnnnnnnnnnnnnnnnnnnnnnnnnnnnnnnnnnnnnnnnnnnnnnnnnnnnnnnnnnnnnnnnnnnnnnnnnnnnnnnnnnnnnnnnnnnnnnn

SEQ ID NO: 4241 - DNA, 825 bp, Xenorhabdus sp.
  unsure (1)..(825): unsure at all n locations
nnnnnnnnnnnnnnnnnnnnnnnnnnnnnnnnnnnnnnnnnnnnnnnnnnnnnnnnnnnnnaggcattcgatacagcaaataaaaatggggaatttttggattggacgcgccatagtgccaacatgacgaacatatgacagaggttatgtgattgacagacataaaaggcattgcacgaaccataataactacaacgaaggactaaatacaggatggtgtggattgatggcaattgatacaggaggcataaaaagcaccctaacgcacataggcaaagcacgaaaaaaacacctacggacaaaacaaacttcaccggcaccgggcgtactaggaacgcacgaaatctannnnnnnnnnnnnnnnnnnnnnnnnnnnnnnnnnnnnnnnnnnnnnnnnnnnnnnnnnnnnnnnnnnnnnnnnnnnnnnnnnnnnnnnnnnnnnnnnnnnnnnnnnnnnnnnnnnnnnnnnnnnnnnnnnnnnnnnnnnnnnnnnnnnnnnnnnnnnnnnnnnnnnnnnnnnnnnnnnnnnnnnnnnnnnnnnnnnnnnnnnnnnnnnnnnnnnnnnnnnnnnnnnnnnnnnnnnnnnnnnnnnnnnnnnnnnnnnnnnnnnnnnnnnnnnnnnnnnnnnnnnnnnnnnnnnnnnnnnnnnnnnnnnnnnnnnnnnnnnnnnnnnnnnnnnnnnnnnnnnnnnnnnnnnnnnnnnnnnnnnnnnnnnnnnnnnnnnnnnnnnnnnnnnnnnnnnnnnnnnnnnnnnnnnnnnnnnnnnnnnnnnnnnnnnnnnnnnnnnnnnnnnnnnnnnnnnnnnnnnnnnnnnnnnnnnnnnnn

SEQ ID NO: 4242 - DNA, 813 bp, Xenorhabdus sp.
  unsure (1)..(813): unsure at all n locations
nnnnnnnnnnnnnnnnnnnnnnnnnnnnnnnnnnnnnnnnnnnnnnnnnnnnnnacgagtttttttgcagcgcccatggatgcccaggacttatatccggaacggggggcgagggtatagcccggggcacattgaaatacaatatccatcccccccnnnnnnnnnnnnnnnnnnnnnnnnnnnnnnnnnnnnnnnnnnnnnnnnnnnnnnnnnnnnnnnnnnnnnnnnnnnnnnnnnnnnnnnnnnnnnnnnnnnnnnnnnnnnnnnnnnnnnnnnnnnnnnnnnnnnnnnnnnnnnnnnnnnnnnnnnnnnnnnnnnnnnnnnnnnnnnnnnnnnnnnnnnnnnnnnnnnnnnnnnnnnnnnnnnnnnnnnnnnnnnnnnnnnnnnnnnnnnnnnnnnnnnnnnnnnnnnnnnnnnnnnnnnnnnnnnnnnnnnnnnnnnnnnnnnnnnnnnnnnnnnnnnnnnnnnnnnnnnnnnnnnnnnnnnnnnnnnnnnnnnnnnnnnnnnnnnnnnnnnnnnnnnnnnnnnnnnnnnnnnnnnnnnnnnnnnnnnnnnnnnnnnnnnnnnnnnnnnnnnnnnnnnnnnnnnnnnnnnnnnnnnnnnnnnnnnnnnnnnnnnnnnnnnnnnnnnnnnnnnnnnnnnnnnnnnnnnnnnnnnnnnnnnnnnnnnnnnnnnnnnnnnnnnnnnnnnnnnnnnnnnnnnnnnnnnnnnnnnnnnnnnnnnnnnnnnnnnnnnnnnnnnnnnnnnnnnnnnnnnnnnnnnnnnnnnnnnnnnnnnnnnnnnnnnnnnnnnnnnnnnnnnnnnnnnnnnnnn

SEQ ID NO: 4243 - DNA, 1192 bp, Xenorhabdus sp.
  unsure (1)..(1192): unsure at all n locations
nnnnnnnnnnnnnnnnnnnnnnnnnnnnnnnnnnaaagcggtaccagctttcaagaccgcgaaaatcgctgtgagcatatccgtactgcgatccatcataatagcaaccatgtccccttttctcacgccagccttcagtaaaacggccaccatactgtctatacggctttggaactggagataagtcagggctggtttcccgccagaacttgcgatagcgattgcgttaccatctaatgcaacctgagtatcaaatagcgttgataaggtttcttgttttgagaattcagtaaccggcccttgttcaaaaagagcaagtcgtgccatttcgtctattgaagataggttaacctgagcaacagtctgctccggtgatgtaaccatctgttcaatgatatgacctaaagatgaagtaaaggcttcaaatgaataatcttcatcgaaaatatcctcagccccggtaatatcaatggcaacttccctgttattcccacaactatgaacatgaatcgcaatagcatcatcttcatgggcnnnnnnnnnnnnnnnnnnnnnnnnnnnnnnnnnnnnnnnnnnnnnnnnnnnnnnnnnnnnnnnnnnnnnnnnnnnnnnnnnnnnnnnnnnnnnnnnnnnnnnnnnnnnnnnnnnnnnnnnnnnnnnnnnnnnnnnnnnnnnnnnnnnnnnnnnnnnnnnnnnnnnnnnnnnnnnnnnnnnnnnnnnnnnnnnnnnnnnnnnnnnnnnnnnnnnnnnnnnnnnnnnnnnnnnnnnnnnnnnnnnnnnnnnnnnnnnnnnnnnnnnnnnnnnnnnnnnnnnnnnnnnnnnnnnnnnnnnnnnnnnnnnnnnnnnnnnnnnnnnnnnnnnnnnnnnnnnnnnnnnnnnnnnnnnnnnnnnnnnnnnnnnnnnnnnnnnnnnnnnnnnnnnnnnnnnnnnnnnnnnnnnnnnnnnnnnnnnnnnnnnnnnnnnnnnnnnnnnnnnnnnnnnnnnnnnnnnnnnnnnnnnnnnnnnnnnnnnnnnnnnnnnnnnnnnnnnnnnnnnnnnnnnnnnnnnnnnnnnnnnnnnnnnnnnnnnnnnnnnnnnnnnnnnnnnnnnnnnnnnnnnnnnnnnnnnnnnnnnnnnnnnnnnnnnnnnnnnnnnnnnnnnnnnnnnnnnnnnnnnnnnnnnnnnnnnnnnnnnnnnnnnnnnnnnnnnnnnn

SEQ ID NO: 4244 - DNA, 1283 bp, Xenorhabdus sp.
  unsure (1)..(1283): unsure at all n locations
nnnnnnnnnnnnnnnnnnnnnnnnnnnnnntgctctaaagactgacctgctgttctataagaaggtctgacttactgctccgnnnnnnnnnnnnnnnnnnnnnnnnnnnnnnnnnnnnnnnnnnnnnnnnnnnnnnnnnnnnnnnnnnnnnnnnnnnnnnnnnnnnnnnnnnnnnnnnnnnnnnnnnnnnnnnnnnnnnnnnnnnnnnnnnnnnnnnnnnnnnnnnnnnnnnnnnnnnnnnnnnnnnnnnnnnnnnnnnnnnnnnnnnnnnnnnnnnnnnnnnnnnnnnnnnnnnnnnnnnnnnnnnnnnnnnnnnnnnnnnnnnnnnnnnnnnnnnnnnnnnnnnnnnnnnnnnnnnnnnnnnnnnnnnnnnnnnnnnnnnnnnnnnnnnnnnnnnnnnnnnnnnnnnnnnnnnnnnnnnnnnnnnnnnnnnnnnnnnnnnnnnnnnnnnnnnnnnnnnnnnnnnnnnnnnnnnnnnnnnnnnnnnnnnnnnnnnnnnnnnnnnnnnnnnnnnnnnnnnnnnnnnnnnnnnnnnnnnnnnnnnnnnnnnnnnnnnnnnnnnnnnnnnnnnnnnnnnnnnnnnnnnnnnnnnnnnnnnnnnnnnnnnnnnnnnnnnnnnnnnnnnnnnnnnnnnnnnnnnnnnnnnnnnnnnnnnnnnnnnnnnnnnnnnnnnnnnnnnnnnnnnnnnnnnnnnnnnnnnnnnnnnnnnnnnnnnnnnnnnnnnnnnnnnnnnnnnnnnnnnnnnnnnnnnnnnnnnnnnnnnnnnnnnnnnnnnnnnnnnnnnnnnnnnnnnnnnnnnnnnnnnnnnnnnnnnnnnnnnnnnnnnnnnnnnnnnnnnnnnnnnnnnnnnnnnnnnnnnnnnnnnnnnnnnnnnnnnnnnnnnnnnnnnnnnnnnnnnnnnnnnnnnnnnnnnnnnnnnnnnnnnnnnnnnnnnnnnnnnnnnnnnnnnnnnnnnnnnnnnnnnnnnnnnnnnnnnnnnnnnnnnnnnnnnnnnnnnnnnnnnnnnnnnnnnnnnnnnnnnnnnnnnnnnnnnnnnnnnnnnnnnnnnnnnnnnnnnnnnnnnnnnnnnnnnnnnnnnnnnnnnnnnnnnnnnnnnnnnnnnnnnnnnnnnnnnnnnnnnnnnnnnnnnnnnnnnnnnnnnnnnnnnnnnnnnnnnnnnnnnnnnnnnnnnnnnnnnnnnnnnnnnnnnnnnnnnnnnnnnnnnnnnnnnnnnnnnnnnnnnnnnnnnnnnnnnnnnnnnnnnnnnnnnnnnnnnnnnnnnnnnnnnnnnnnnnnnnnnnnnn

SEQ ID NO: 4245 - DNA, 877 bp, Xenorhabdus sp.
  unsure (1)..(877): unsure at all n locations
nnnnnnnnnnnnnnnnnnnnnnnnnnnnnnnnnnnnnnnnnnnnnnnnnnnnnnnnnnnnnnnnnnnnnnnnnttatacaatttgaacaggctcattttttatcatcaaatctttctgggcatatacgggaggctagtcaccactggnnnnnnnnnnnnnnnnnnnnnnnnnnnnnnnnnnnnnnnnnnnnnnnnnnnnnnnnnnnnnnnnnnnnnnnnnnnnnnnnnnnnnnnnnnnnnnnnnnnnnnnnnnnnnnnnnnnnnnnnnnnnnnnnnnnnnnnnnnnnnnnnnnnnnnnnnnnnnnnnnnnnnnnnnnnnnnnnnnnnnnnnnnnnnnnnnnnnnnnnnnnnnnnnnnnnnnnnnnnnnnnnnnnnnnnnnnnnnnnnnnnnnnnnnnnnnnnnnnnnnnnnnnnnnnnnnnnnnnnnnnnnnnnnnnnnnnnnnnnnnnnnnnnnnnnnnnnnnnnnnnnnnnnnnnnnnnnnnnnnnnnnnnnnnnnnnnnnnnnnnnnnnnnnnnnnnnnnnnnnnnnnnnnnnnnnnnnnnnnnnnnnnnnnnnnnnnnnnnnnnnnnnnnnnnnnnnnnnnnnnnnnnnnnnnnnnnnnnnnnnnnnnnnnnnnnnnnnnnnnnnnnnnnnnnnnnnnnnnnnnnnnnnnnnnnnnnnnnnnnnnnnnnnnnnnnnnnnnnnnnnnnnnnnnnnnnnnnnnnnnnnnnnnnnnnnnnnnnnnnnnnnnnnnnnnnnnnnnnnnnnnnnnnnnnnnnnnnnnnnnnnnnnnnnnnnnnnnnnnnnnnnnnnnnnnnnnnnnnnnnnnnnnnnnnnnnnnnnnnnnnnnnnnnnnnnnnnnnnnnnnnnnnnnnnnnnnnnnnnnnnnnnnnnnn

SEQ ID NO: 4246 - DNA, 725 bp, Xenorhabdus sp.
  unsure (1)..(725): unsure at all n locations
nnnnnnnnnnnnnnnnnnnnnnnnnnnnnnnnnnnnnnnnnnnnnnnnnnnnnnnnnnnnnnnnnnnnnnnnnnnnnnnnnnnnnnnnnnnnnnnnnnnnnnnnnnnnnnnnnnnnnnnnnnnnacaacggtaatgcataagaggcgctaatgtgcgtggcctgtacctataactgtacaggctatactagcatgaatcggatgaatatgaggcgtatgcaaatgtgccacatgctgtgccaaagcccgcccactgagccgcgggtgggtccactacggaagactgcgccccaatcatgcgcaaacctggagctatagctgtatgaggagctgaacgatgcgcatgttcacgcagttgttagaccgtctattgccatcgaaccaagaggagcggccccagcctgatcgcactgtgagcccctactcgcgtgagatggaacagctggcagctgcgccctaaccacgatctcaaannnnnnnnnnnnnnnnnnnnnnnnnnnnnnnnnnnnnnnnnnnnnnnnnnnnnnnnnnnnnnnnnnnnnnnnnnnnnnnnnnnnnnnnnnnnnnnnnnnnnnnnnnnnnnnnnnnnnnnnnnnnnnnnnnnnnnnnnnnnnnnnnnnnnnnnnnnnnnnnnnnnnnnnnnnnnnnnnnnnnnnnnnnnnnnnnnnnnnnnnnnnnnnnnnnnnnnnnnnnnnnnnnnnnnnnnnnnnnnnnnnnnnnnnnnn

SEQ ID NO: 4247 - DNA, 837 bp, Xenorhabdus sp.
  unsure (1)..(837): unsure at all n locations
nnnnnnnnnnnnnnnnnnnnnnnnnnnnnnnnnnnnnnnnnnnnnnnnaacaactctcaatttaccttaagtattctgcagaagtgattataatcacagcgatcttaagcgaattgggtttattgactcatcgctggatcaggcccccctcacttccagtgatctttttttggttaccttttttagacagaattaacggaaaacgcacttttgagataataccttcacgaatgcggtagtttatgattgatatctgtcaagttannnnnnnnnnnnnnnnnnnnnnnnnnnnnnnnnnnnnnnnnnnnnnnnnnnnnnnnnnnnnnnnnnnnnnnnnnnnnnnnnnnnnnnnnnnnnnnnnnnnnnnnnnnnnnnnnnnnnnnnnnnnnnnnnnnnnnnnnnnnnnnnnnnnnnnnnnnnnnnnnnnnnnnnnnnnnnnnnnnnnnnnnnnnnnnnnnnnnnnnnnnnnnnnnnnnnnnnnnnnnnnnnnnnnnnnnnnnnnnnnnnnnnnnnnnnnnnnnnnnnnnnnnnnnnnnnnnnnnnnnnnnnnnnnnnnnnnnnnnnnnnnnnnnnnnnnnnnnnnnnnnnnnnnnnnnnnnnnnnnnnnnnnnnnnnnnnnnnnnnnnnnnnnnnnnnnnnnnnnnnnnnnnnnnnnnnnnnnnnnnnnnnnnnnnnnnnnnnnnnnnnnnnnnnnnnnnnnnnnnnnnnnnnnnnnnnnnnnnnnnnnnnnnnnnnnnnnnnnnnnnnnnnnnnnnnnnnnnnnnnnnnnnnnnnnnnnnnnnnnnnnnnnnnnnnnnnnnnnnnnnnnnnnnnnnnnnnnnnnnnnnnnnnnnnnnn

SEQ ID NO: 4248 - DNA, 915 bp, Xenorhabdus sp.
  unsure (1)..(915): unsure at all n locations
nnnnnnnnnnnnnnnnnnnnnnnnnnnnnnnnnnnnaaggtcgggcaaatttacgcccgtatgcctagatgccacctacactgggaaaggtcatccgcgttgcgtttaatgagtattcagcatcgcgccacgagaattcgaggcctttcatgctagaccagaacagaaacccccatctaggaaatggaagtccctgatcttttaagaccgagaagagtggggcactgaaacagtggaaccgcaaaatgaggnnnnnnnnnnnnnnnnnnnnnnnnnnnnnnnnnnnnnnnnnnnnnnnnnnnnnnnnnnnnnnnnnnnnnnnnnnnnnnnnnnnnnnnnnnnnnnnnnnnnnnnnnnnnnnnnnnnnnnnnnnnnnnnnnnnnnnnnnnnnnnnnnnnnnnnnnnnnnnnnnnnnnnnnnnnnnnnnnnnnnnnnnnnnnnnnnnnnnnnnnnnnnnnnnnnnnnnnnnnnnnnnnnnnnnnnnnnnnnnnnnnnnnnnnnnnnnnnnnnnnnnnnnnnnnnnnnnnnnnnnnnnnnnnnnnnnnnnnnnnnnnnnnnnnnnnnnnnnnnnnnnnnnnnnnnnnnnnnnnnnnnnnnnnnnnnnnnnnnnnnnnnnnnnnnnnnnnnnnnnnnnnnnnnnnnnnnnnnnnnnnnnnnnnnnnnnnnnnnnnnnnnnnnnnnnnnnnnnnnnnnnnnnnnnnnnnnnnnnnnnnnnnnnnnnnnnnnnnnnnnnnnnnnnnnnnnnnnnnnnnnnnnnnnnnnnnnnnnnnnnnnnnnnnnnnnnnnnnnnnnnnnnnnnnnnnnnnnnnnnnnnnnnnnnnnnnnnnnnnnnnnnnnnnnnnnnnnnnnnnnnnnnnnnnnnnnnnnnnnnnnnnnnnnnnnnnnnnnnnnnnnnnnnnnnnnnnnnnnnnnnnn

SEQ ID NO: 4249 - DNA, 632 bp, Xenorhabdus sp.
  unsure (1)..(632): unsure at all n locations
nnnnnnnnnnnnnnnnnnnnnnnnnnnaaaatatttatttatattaacaatagttagaaaacatctagaaaatcaacaatgtgtgtataccttactatttaaggctttgggnnnnnnnnnnnnnnnnnnnnnnnnnnnnnnnnnnnnnnnnnnnnnnnnnnnnnnnnnnnnnnnnnnnnnnnnnnnnnnnnnnnnnnnnnnnnnnnnnnnnnnnnnnnnnnnnnnnnnnnnnnnnnnnnnnnnnnnnnnnnnnnnnnnnnnnnnnnnnnnnnnnnnnnnnnnnnnnnnnnnnnnnnnnnnnnnnnnnnnnnnnnnnnnnnnnnnnnnnnnnnnnnnnnnnnnnnnnnnnnnnnnnnnnnnnnnnnnnnnnnnnnnnnnnnnnnnnnnnnnnnnnnnnnnnnnnnnnnnnnnnnnnnnnnnnnnnnnnnnnnnnnnnnnnnnnnnnnnnnnnnnnnnnnnnnnnnnnnnnnnnnnnnnnnnnnnnnnnnnnnnnnnnnnnnnnnnnnnnnnnnnnnnnnnnnnnnnnnnnnnnnnnnnnnnnnnnnnnnnnnnnnnnnnnnnnnnnnnnnnnnnnnnnnnnnnnnnnnnnnnnnnnnnnnnnnnnnnnnnnnnnnnnnnnnnnnnnnnnnnnn

SEQ ID NO: 4250 - DNA, 555 bp, Xenorhabdus sp.
  unsure (1)..(555): unsure at all n locations
nnnnnnnnnnnnnnnnnnnnnnnnntgctttgatagatgaaaagaagctcggtggctgctgttctgatttaattgtgcagcaactctaaattnnnnnnnnnnnnnnnnnnnnnnnnnnnnnnnnnnnnnnnnnnnnnnnnnnnnnnnnnnnnnnnnnnnnnnnnnnnnnnnnnnnnnnnnnnnnnnnnnnnnnnnnnnnnnnnnnnnnnnnnnnnnnnnnnnnnnnnnnnnnnnnnnnnnnnnnnnnnnnnnnnnnnnnnnnnnnnnnnnnnnnnnnnnnnnnnnnnnnnnnnnnnnnnnnnnnnnnnnnnnnnnnnnnnnnnnnnnnnnnnnnnnnnnnnnnnnnnnnnnnnnnnnnnnnnnnnnnnnnnnnnnnnnnnnnnnnnnnnnnnnnnnnnnnnnnnnnnnnnnnnnnnnnnnnnnnnnnnnnnnnnnnnnnnnnnnnnnnnnnnnnnnnnnnnnnnnnnnnnnnnnnnnnnnnnnnnnnnnnnnnnnnnnnnnnnnnnnnnnnnnnnnnnnnnnnnnnnnnnnnnnnnnnnnnnnnnnnnnnnnnnn

SEQ ID NO: 4251 - DNA, 930 bp, Xenorhabdus sp.
  unsure (1)..(930): unsure at all n locations
nnnnnnnnnnnnnnnnnnnnnnnnnnnnnnnnnnnnnnnnnnnnnnnnnnnnnnnnnnnnnnnnnnnnnnnnnnnnnnnnnnnnnnnnnnnnnnnnnnnnnnnnnnnnnnnnnnnnnnnnnnnnnnnnnnnnnnnnnnnnnnnnnnnnnnnnnnnnnnnnnnnnnnnnnnnnnngggcacgccacagggagtatcgcgtggaacagatctattttcgtcggaatcacggacgtctgccgtgcgccactaatatgcgatttttgaaactcatgacgcgacctcatggggcataatcggaaccgggtggcataacgcggctcgacaggtatcgtgtaaatggacgctcgatatacaaaatactccgtccgtaatcaccggacaaaccggccttcctcccaatttttcagcagctgtgtcccgctggctgtctactcggatcgggattatgcgtgtaaagacggataggagcagagaaggattatgctttgatgggtaattttgggctgcgcgatttgatctatcaggggcccggcatgcgcaccgtttcgctgccgcacggccgccagacgctgcacaccatgccaaccagcagcggttatgaaatccgccgcggcggctattatgactgggatgggcgcaaacgcggccagactcccttaacggagctgccatattgcattggcggacagggcaacctgcgtttcgagaaccgccattttgtggtgaaaccgggtgaaannnnnnnnnnnnnnnnnnnnnnnnnnnnnnnnnnnnnnnnnnnnnnnnnnnnnnnnnnnnnnnnnnnnnnnnnnnnnnnnnnnnnnnnnnnnnnnnnnnnnnnnnnnnnnnnnnnnnnnnnnnnnnnnnnnnnnnnnnnnnnnnnnnnnnnnnnnnnnnnnnnnnnnnnnnnnnnnnnnnnnnnnnnnnnnn

SEQ ID NO: 4252 - DNA, 584 bp, Xenorhabdus sp.
  unsure (1)..(584): unsure at all n locations
nnnnnnnnnnnnnntgctctaaaatccggcggacttgccgacatcactgtcgttccggcgatatggacatgtaagccggctgcgccgctcgactggggtacgctgctggccatcgggcttttggcgcatatggagcaatattgctttgtgcggccctatcgcatcgacgacacctgcgtccttgcccccatcggttatctctggatcctgcacatcacgggtgacagatattaactgtgtgacgaggtgccgtaaaccctcgtggggctcggtatagccatcatactcgttacgcatgagtcaaccagactggtggaatatgtcctcaagacgctgcaccgacggagataacggatactcccctaccatctagaattccatgaccctcagacagatccagaacaaggccgcgagtacgacgcaatcgtaaaaggaacgggcgacacgcacataacgcatgatccaggcgagccacgcatacgagaggagcttatccctgcccacgtgatagatgcattatnnnnnnnnnnnnnnnnnnnnnnnnnnnnnnnnnnnnnnnnnnnnnnnnnnnnnnnnnnnnnnnn

SEQ ID NO: 4253 - DNA, 648 bp, Xenorhabdus sp.
  unsure (1)..(648): unsure at all n locations
nnnnnnnnnctgtaacnatgaacaaccgttcttacatggggtgacgttggcgggtggttttcagattttttctcagnnnnnnnnnnnnnnnnnnnnnnnnnnnnnnnnnnnnnnnnnnnnnnnnnnnnnnnnnnnnnnnnnnnnnnnnnnnnnnnnnnnnnnnnnnnnnnnnnnnnnnnnnnnnnnnnnnnnnnnnnnnnnnnnnnnnnnnnnnnnnnnnnnnnnnnnnnnnnnnnnnnnnnnnnnnnnnnnnnnnnnnnnnnnnnnnnnnnnnnnnnnnnnnnnnnnnnnnnnnnnnnnnnnnnnnnnnnnnnnnnnnnnnnnnnnnnnnnnnnnnnnnnnnnnnnnnnnnnnnnnnnnnnnnnnnnnnnnnnnnnnnnnnnnnnnnnnnnnnnnnnnnnnnnnnnnnnnnnnnnnnnnnnnnnnnnnnnnnnnnnnnnnnnnnnnnnnnnnnnnnnnnnnnnnnnnnnnnnnnnnnnnnnnnnnnnnnnnnnnnnnnnnnnnnnnnnnnnnnnnnnnnnnnnnnnnnnnnnnnnnnnnnnnnnnnnnnnnnnnnnnnnnnnnnnnnnnnnnnnnnnnnnnnnnnnnnnnnnnnnnnnnnnnnnnnnnnnnnnnnnnnnnnnnnnnnnnnnnnnnnnnnnnnnnnnn

SEQ ID NO: 4254 - DNA, 1058 bp, Xenorhabdus sp.
  unsure (1)..(1058): unsure at all n locations
nnnnnnnnnnnnnnnnnnnnnnnnnnnnnnnnnnnnnnnnnnnnnnnnnnnnnnnnnnnnnnnnnnnnnnnnnnnnnnnnnnnnnnnnnnnnnnnnnnnnnncctcctgcccaacaagtattttatgtgtggccaccaccaccacgggtggcttttcatatacaatttgctgatgcaactggtaaggcttttgcagtgaattcgttataacccgggctttttttccnnnnnnnnnnnnnnnnnnnnnnnnnnnnnnnnnnnnnnnnnnnnnnnnnnnnnnnnnnnnnnnnnnnnnnnnnnnnnnnnnnnnnnnnnnnnnnnnnnnnnnnnnnnnnnnnnnnnnnnnnnnnnnnnnnnnnnnnnnnnnnnnnnnnnnnnnnnnnnnnnnnnnnnnnnnnnnnnnnnnnnnnnnnnnnnnnnnnnnnnnnnnnnnnnnnnnnnnnnnnnnnnnnnnnnnnnnnnnnnnnnnnnnnnnnnnnnnnnnnnnnnnnnnnnnnnnnnnnnnnnnnnnnnnnnnnnnnnnnnnnnnnnnnnnnnnnnnnnnnnnnnnnnnnnnnnnnnnnnnnnnnnnnnnnnnnnnnnnnnnnnnnnnnnnnnnnnnnnnnnnnnnnnnnnnnnnnnnnnnnnnnnnnnnnnnnnnnnnnnnnnnnnnnnnnnnnnnnnnnnnnnnnnnnnnnnnnnnnnnnnnnnnnnnnnnnnnnnnnnnnnnnnnnnnnnnnnnnnnnnnnnnnnnnnnnnnnnnnnnnnnnnnnnnnnnnnnnnnnnnnnnnnnnnnnnnnnnnnnnnnnnnnnnnnnnnnnnnnnnnnnnnnnnnnnnnnnnnnnnnnnnnnnnnnnnnnnnnnnnnnnnnnnnnnnnnnnnnnnnnnnnnnnnnnnnnnnnnnnnnnnnnnnnnnnnnnnnnnnnnnnnnnnnnnnnnnnnnnnnnnnnnnnnnnnnnnnnnnnnnnnnnnnnnnnnnnnnnnnnnnnnnnnnnnnnnnnnnnnnnnnnnnnnnnnnnnnnnnnnnnnnnnnnnnnnnnnnnnnnnnnnnnnnnnnnnnnnnnnnnnnnnnnnnnnnn

SEQ ID NO: 4255 - DNA, 726 bp, Xenorhabdus sp.
  unsure (1)..(726): unsure at all n locations
nnnnnnnnnnnnnnnnnnnnnngccctaaatgattagtcccttatagccaaactgacgacctaactgtgtaacatagtcgtttatacggtacaacaaggagggcaacggatcccagaaaattggcatcgtaattatccgtcttcggataaaaaccaaaatgacatttatctaaatgccccaatgacgggaccacccaaagaagttggtatacgtatcctccgctgttttatatagtcaatgactgactgggatcgtgatgacatttttttgggagcttgagcaaaatgggctgaggccaaaaatcctaaagtgttttgaaccagaacagagtatcccacannnnnnnnnnnnnnnnnnnnnnnnnnnnnnnnnnnnnnnnnnnnnnnnnnnnnnnnnnnnnnnnnnnnnnnnnnnnnnnnnnnnnnnnnnnnnnnnnnnnnnnnnnnnnnnnnnnnnnnnnnnnnnnnnnnnnnnnnnnnnnnnnnnnnnnnnnnnnnnnnnnnnnnnnnnnnnnnnnnnnnnnnnnnnnnnnnnnnnnnnnnnnnnnnnnnnnnnnnnnnnnnnnnnnnnnnnnnnnnnnnnnnnnnnnnnnnnnnnnnnnnnnnnnnnnnnnnnnnnnnnnnnnnnnnnnnnnnnnnnnnnnnnnnnnnnnnnnnnnnnnnnnnnnnnnnnnnnnnnnnnnnnnnnnnnnnnnnnnnnnnnnnnnnnnnnnnnnnnnnnnnnnn

SEQ ID NO: 4256 - DNA, 714 bp, Xenorhabdus sp.
  unsure (1)..(714): unsure at all n locations
nnnnnnnnnnnnnnnnnnnnnnnnttaaagcccagacataaccctgactgatgtgcaagataaccgctggctaatgctggaactctggatgcgtatatactttacatatacgaagccctcatctaaccagatatttcatgacgctcattcaaagtaccgaccatttttatggaaccaagattggttactccccacataccccccaatctaactgagcctgtcaagagtatctatgattctttcggactggtcggcggtatgatccgtattactgatgttgttataacgatttgtcctgatgactgactgatttatgatgttaggacaccttcagaaaccatagaagattccccactgtgcgcgattgctgccactgacagtcctccaatacaaaatgatgccgtcttaattaatgcaacagttattactttcttaacaaataactacaatccaccgatcattcacacaggaaaccattatgtggtgactgactgtcacacattgcacggctaccctgtcaccattatacaaagacgccggctgctgaattctcccgaacgaccatgtacannnnnnnnnnnnnnnnnnnnnnnnnnnnnnnnnnnnnnnnnnnnnnnnnnnnnnnnnnnnnnnnnnnnnnnnnnnnnnnnnnnnnnnnnnnnnnnnnnnnnnnnnnnnnnnnnnnnnnnnnnnnnnnnnnnnnnnnnnnnnnnn

SEQ ID NO: 4257 - DNA, 950 bp, Xenorhabdus sp.
  unsure (1)..(950): unsure at all n locations
nnnnnnnnnnnnnnnnnnnnnnnnnnnnnnnnnntgctctaaagcggcgagatcgagaatggcaggtcgatcagcgtaatcaggaacgccttgcccttgaattcgaacttggcgatcgcccaggcggcggcaacgccgaagaccacgttgagcggcaccgagatggcggcgacaagcaaagtcaggcgaatagccgacagcgcatccggctcgacgatggcttcccagaaggcttccccgcctttgcggaaggcttcgaagaacaccgagacgagcggcagcacgaggaaggccgcaaggaacagaaaagcgatggcgaccagcgccaggcgggcgggaaggctttcgctggcgggatcgcgaaacggccgggaggaggtgcgggaagcggtctcaaacataaccgtacctcttgcgggtccaggcctgaatgaaattgatgaggaacaacatggcaaacgagatgatcaacatgatgggggcgatgccggtcgcggccgcataattgaacttcttcaaccggatgaccatgaagaacggcgcgatttccgaaacataccgaatattgccggcgatgaaannnnnnnnnnnnnnnnnnnnnnnnnnnnnnnnnnnnnnnnnnnnnnnnnnnnnnnnnnnnnnnnnnnnnnnnnnnnnnnnnnnnnnnnnnnnnnnnnnnnnnnnnnnnnnnnnnnnnnnnnnnnnnnnnnnnnnnnnnnnnnnnnnnnnnnnnnnnnnnnnnnnnnnnnnnnnnnnnnnnnnnnnnnnnnnnnnnnnnnnnnnnnnnnnnnnnnnnnnnnnnnnnnnnnnnnnnnnnnnnnnnnnnnnnnnnnnnnnnnnnnnnnnnnnnnnnnnnnnnnnnnnnnnnnnnnnnnnnnnnnnnnnnnnnnnnnnnnnnnnnnnnnnnnnnnnnnnnnnnnnnnnnnnnnnnnnnnnnnnnnnnnnnnnnn

SEQ ID NO: 4258 - DNA, 735 bp, Xenorhabdus sp.
  unsure (1)..(735): unsure at all n locations
nnnnnnnnnnnnnnnnnnnnnnnnnnnnnnnnnnnnctctaaaggatcgatgaccgcccgacccgtccaccagcctggagaaacagagcgagatcgatgcctgactgcaaatgctcacataatacgtgggtctggcgatctttatcatctccctaatgaactgtggccgcccccaaaccatgtactgcatggcactacataccacgcgtgacaggcatatgtcgtgcctttttgatacgtccatgcgctgcatccataataaattaaacccatggcacagcaagctgttaactggaatcacgatctgactgagcctggccaactgtataatcatgattctatagcacccccctaacttagcctgacacacttcatatatttatgcgtcgtgagaataataggatatcggatctttccggttataggggactggccacagcagataccgaagtactnnnnnnnnnnnnnnnnnnnnnnnnnnnnnnnnnnnnnnnnnnnnnnnnnnnnnnnnnnnnnnnnnnnnnnnnnnnnnnnnnnnnnnnnnnnnnnnnnnnnnnnnnnnnnnnnnnnnnnnnnnnnnnnnnnnnnnnnnnnnnnnnnnnnnnnnnnnnnnnnnnnnnnnnnnnnnnnnnnnnnnnnnnnnnnnnnnnnnnnnnnnnnnnnnnnnnnnnnnnnnnnnnnnnnnnnnnnnnnnnnnnnnnnnnnnnnnnnnnnnnnnnnnnnnnnnnnnnnnnn

SEQ ID NO: 4259 - DNA, 1069 bp, Xenorhabdus sp.
  unsure (1)..(1069): unsure at all n locations
nnnnnnnnnnnnnntgctcttccatgtgctctaaagagcacggtaacttccggcttcacttgaacctttggggttcccctaccagttagggttatatggcctttacaaaggtctatctcccagttcttggatgatccaaaggctggcttggcgtccttatgattggaaaaccaggcttggcggattaagtcatgtcctatagtggcgcatcctacatatgctgtaaatatcaagcccgggtgacctataatccttatgatgacgcttaaccgcatgtgcctctatttgtcatgtaacgcatcttttcgcttgtgcctttgcgagcgtagatctccctcccgattcactatggcggattcacccttatgctactgctaaggcgtatgtgactggggaataaatgttcgctggtcaatttttccatctcacttcaacttcggtattttttnnnnnnnnnnnnnnnnnnnnnnnnnnnnnnnnnnnnnnnnnnnnnnnnnnnnnnnnnnnnnnnnnnnnnnnnnnnnnnnnnnnnnnnnnnnnnnnnnnnnnnnnnnnnnnnnnnnnnnnnnnnnnnnnnnnnnnnnnnnnnnnnnnnnnnnnnnnnnnnnnnnnnnnnnnnnnnnnnnnnnnnnnnnnnnnnnnnnnnnnnnnnnnnnnnnnnnnnnnnnnnnnnnnnnnnnnnnnnnnnnnnnnnnnnnnnnnnnnnnnnnnnnnnnnnnnnnnnnnnnnnnnnnnnnnnnnnnnnnnnnnnnnnnnnnnnnnnnnnnnnnnnnnnnnnnnnnnnnnnnnnnnnnnnnnnnnnnnnnnnnnnnnnnnnnnnnnnnnnnnnnnnnnnnnnnnnnnnnnnnnnnnnnnnnnnnnnnnnnnnnnnnnnnnnnnnnnnnnnnnnnnnnnnnnnnnnnnnnnnnnnnnnnnnnnnnnnnnnnnnnnnnnnnnnnnnnnnnnnnnnnnnnnnnnnnnnnnnnnnnnnnnnnnnnnnnnnnnnnnnnnnnnnnnnnnnnnnnnnnnnnnnnnnnnnnnnnnnnnnnnnnnnnnnnnnnnnnnnnnnnnnnnnnnnnnnnnnnnnnnn

SEQ ID NO: 4260 - DNA, 1054 bp, Xenorhabdus sp.
  unsure (1)..(1054): unsure at all n locations
nnnnnnnnnnnnnnnnnnnnnnnnnnnnnnnnnnnnnnnnnnnnnnnnnnnnnnnnnnnnnnnnacggaaggccagttaacggaaaaaattataaaagcctattttacgcatcacgcaaaacctaacccaaacgagcagtttttttaaaaaaagggacgcaccccacacccgaagcgnatccggactttcagtccgtgaataaacaaacacaacgacgctaaacaggggaaatagcatccgaacaactgatacacggctgcgcagccatactagccaaaaaagcagagctcacaaaacgacaaccacccannnnnnnnnnnnnnnnnnnnnnnnnnnnnnnnnnnnnnnnnnnnnnnnnnnnnnnnnnnnnnnnnnnnnnnnnnnnnnnnnnnnnnnnnnnnnnnnnnnnnnnnnnnnnnnnnnnnnnnnnnnnnnnnnnnnnnnnnnnnnnnnnnnnnnnnnnnnnnnnnnnnnnnnnnnnnnnnnnnnnnnnnnnnnnnnnnnnnnnnnnnnnnnnnnnnnnnnnnnnnnnnnnnnnnnnnnnnnnnnnnnnnnnnnnnnnnnnnnnnnnnnnnnnnnnnnnnnnnnnnnnnnnnnnnnnnnnnnnnnnnnnnnnnnnnnnnnnnnnnnnnnnnnnnnnnnnnnnnnnnnnnnnnnnnnnnnnnnnnnnnnnnnnnnnnnnnnnnnnnnnnnnnnnnnnnnnnnnnnnnnnnnnnnnnnnnnnnnnnnnnnnnnnnnnnnnnnnnnnnnnnnnnnnnnnnnnnnnnnnnnnnnnnnnnnnnnnnnnnnnnnnnnnnnnnnnnnnnnnnnnnnnnnnnnnnnnnnnnnnnnnnnnnnnnnnnnnnnnnnnnnnnnnnnnnnnnnnnnnnnnnnnnnnnnnnnnnnnnnnnnnnnnnnnnnnnnnnnnnnnnnnnnnnnnnnnnnnnnnnnnnnnnnnnnnnnnnnnnnnnnnnnnnnnnnnnnnnnnnnnnnnnnnnnnnnnnnnnnnnnnnnnnnnnnnnnnnnnnnnnnnnnnnnnnnnnnnnnnnnnnnnnnnnnnnnnnnnnnnnnnnn

SEQ ID NO: 4261 - DNA, 957 bp, Xenorhabdus sp.
  unsure (1)..(957): unsure at all n locations
nnnnnnnnnnnnnnnnnnnnnnnnnnnnnnnnnnnnngtgctctaaagatgccgctccactgtatgtgtttcttaccaacacctttgttgcggggattaacaactgccatacatccacataatcaaagacgacctctcggttgaataccatgtggcccacaaaatcttaggcctaacaccctactgatactgaacacacactcgcttgcctatgttgttggcacacgcatgcttactggactaagaacatccacaccctgagatgatgatcacccgcaagccattccgccatgcagctcttcgaggcgctacaccattgagtgatcccctgtcccatatcatggatgtgccacatctgctataggaccatcgctatctggcgctgggctactatcttctgatcnnnnnnnnnnnnnnnnnnnnnnnnnnnnnnnnnnnnnnnnnnnnnnnnnnnnnnnnnnnnnnnnnnnnnnnnnnnnnnnnnnnnnnnnnnnnnnnnnnnnnnnnnnnnnnnnnnnnnnnnnnnnnnnnnnnnnnnnnnnnnnnnnnnnnnnnnnnnnnnnnnnnnnnnnnnnnnnnnnnnnnnnnnnnnnnnnnnnnnnnnnnnnnnnnnnnnnnnnnnnnnnnnnnnnnnnnnnnnnnnnnnnnnnnnnnnnnnnnnnnnnnnnnnnnnnnnnnnnnnnnnnnnnnnnnnnnnnnnnnnnnnnnnnnnnnnnnnnnnnnnnnnnnnnnnnnnnnnnnnnnnnnnnnnnnnnnnnnnnnnnnnnnnnnnnnnnnnnnnnnnnnnnnnnnnnnnnnnnnnnnnnnnnnnnnnnnnnnnnnnnnnnnnnnnnnnnnnnnnnnnnnnnnnnnnnnnnnnnnnnnnnnnnnnnnnnnnnnnnnnnnnnnnnnnnnnnnnnnnnnnnnnnnnnnnnnnnnnnnnnnnnnnnnnnnnnnnnnnnnnnnnnnnnnnnnnnn

SEQ ID NO: 4262 - DNA, 903 bp, Xenorhabdus sp.
  unsure (1)..(903): unsure at all n locations
nnnnnnnnnnnnnnnnnnnnnnnnnnnnnnnnnnnnnnnnnnnnntgggcttgagcatgggcatagctgtttgctgtgggagcctatggtgcttcccttattttacgtctaagaggcatgaagatatgtgttaatagcttactggcattaaccggagtatgtccatgctgccctcgagctgcgctgcccaaacaactaccccctgatatgcttgtatggaatcgagaatgggagcatgggaatttgcatcattcgcgtgcatacctgatttaagactactgcagatttttgattttctcatactgctcacctaaatactctagcgaaaggatccgccttcttaagatggcgggggtgctctaattgggattcctgannnnnnnnnnnnnnnnnnnnnnnnnnnnnnnnnnnnnnnnnnnnnnnnnnnnnnnnnnnnnnnnnnnnnnnnnnnnnnnnnnnnnnnnnnnnnnnnnnnnnnnnnnnnnnnnnnnnnnnnnnnnnnnnnnnnnnnnnnnnnnnnnnnnnnnnnnnnnnnnnnnnnnnnnnnnnnnnnnnnnnnnnnnnnnnnnnnnnnnnnnnnnnnnnnnnnnnnnnnnnnnnnnnnnnnnnnnnnnnnnnnnnnnnnnnnnnnnnnnnnnnnnnnnnnnnnnnnnnnnnnnnnnnnnnnnnnnnnnnnnnnnnnnnnnnnnnnnnnnnnnnnnnnnnnnnnnnnnnnnnnnnnnnnnnnnnnnnnnnnnnnnnnnnnnnnnnnnnnnnnnnnnnnnnnnnnnnnnnnnnnnnnnnnnnnnnnnnnnnnnnnnnnnnnnnnnnnnnnnnnnnnnnnnnnnnnnnnnnnnnnnnnnnnnnnnnnnnnnnnnnnnnnnnnnnnnnnnnnnnnnnnnnnnnnnnnnnnnnnnnnnnnnn

SEQ ID NO: 4263 - DNA, 971 bp, Xenorhabdus sp.
  unsure (1)..(971): unsure at all n locations
nnnnnnnnnnnnnnnnnnnnnnnnnnnnnnnnnnnnnnnnnnnnnactggacttgcacattgatcttgatgacgatcggctcctccatatacggcgggcaggtcgctgcgcagcttggcgctggcgcccttcttgttcgggaccgcctctttcgtacggttgtcaatactgaagacgactgtcgtcttcgactggccgtctgccacggtggactggatttcatcgacaccgctgatggcggccacagtgtcttcgattttcttcgtgacctgcatttccagcttggagggcgaagccccgctctgggtcacggtgacagccacgacaggaacgttgatattgggaaaaccggtgatccgcaggggcttgaaagcctgcttgccgaggannnnnnnnnnnnnnnnnnnnnnnnnnnnnnnnnnnnnnnnnnnnnnnnnnnnnnnnnnnnnnnnnnnnnnnnnnnnnnnnnnnnnnnnnnnnnnnnnnnnnnnnnnnnnnnnnnnnnnnnnnnnnnnnnnnnnnnnnnnnnnnnnnnnnnnnnnnnnnnnnnnnnnnnnnnnnnnnnnnnnnnnnnnnnnnnnnnnnnnnnnnnnnnnnnnnnnnnnnnnnnnnnnnnnnnnnnnnnnnnnnnnnnnnnnnnnnnnnnnnnnnnnnnnnnnnnnnnnnnnnnnnnnnnnnnnnnnnnnnnnnnnnnnnnnnnnnnnnnnnnnnnnnnnnnnnnnnnnnnnnnnnnnnnnnnnnnnnnnnnnnnnnnnnnnnnnnnnnnnnnnnnnnnnnnnnnnnnnnnnnnnnnnnnnnnnnnnnnnnnnnnnnnnnnnnnnnnnnnnnnnnnnnnnnnnnnnnnnnnnnnnnnnnnnnnnnnnnnnnnnnnnnnnnnnnnnnnnnnnnnnnnnnnnnnnnnnnnnnnnnnnnnnnnnnnnnnnnnnnnnnnnnnnnnnnnnnnnnnnnnnnnnnnnnnnnnnnnnnnnnnn

SEQ ID NO: 4264 - DNA, 977 bp, Xenorhabdus sp.
  unsure (1)..(977): unsure at all n locations
nnaaagctttaaagcacactggggggggcgggcggtatacaatcgagactgggaaaacacatctccctttcttcctatagtgagacacaccattggggatgggcctggacaaccggtggagtgaatccaacaccacccagggagaggcggcctgcgctatgggcgctcatccgctacctatctgactgacnnnnnnnnnnnnnnnnnnnnnnnnnnnnnnnnnnnnnnnnnnnnnnnnnnnnnnnnnnnnnnnnnnnnnnnnnnnnnnnnnnnnnnnnnnnnnnnnnnnnnnnnnnnnnnnnnnnnnnnnnnnnnnnnnnnnnnnnnnnnnnnnnnnnnnnnnnnnnnnnnnnnnnnnnnnnnnnnnnnnnnnnnnnnnnnnnnnnnnnnnnnnnnnnnnnnnnnnnnnnnnnnnnnnnnnnnnnnnnnnnnnnnnnnnnnnnnnnnnnnnnnnnnnnnnnnnnnnnnnnnnnnnnnnnnnnnnnnnnnnnnnnnnnnnnnnnnnnnnnnnnnnnnnnnnnnnnnnnnnnnnnnnnnnnnnnnnnnnnnnnnnnnnnnnnnnnnnnnnnnnnnnnnnnnnnnnnnnnnnnnnnnnnnnnnnnnnnnnnnnnnnnnnnnnnnnnnnnnnnnnnnnnnnnnnnnnnnnnnnnnnnnnnnnnnnnnnnnnnnnnnnnnnnnnnnnnnnnnnnnnnnnnnnnnnnnnnnnnnnnnnnnnnnnnnnnnnnnnnnnnnnnnnnnnnnnnnnnnnnnnnnnnnnnnnnnnnnnnnnnnnnnnnnnnnnnnnnnnnnnnnnnnnnnnnnnnnnnnnnnnnnnnnnnnnnnnnnnnnnnnnnnnnnnnnnnnnnnnnnnnnnnnnnnnnnnnnnnnnnnnnnnnnnnnnnnnnnnnnnnnnnnnnnnnnnnnnnnnnnnnnnnnnnnnnnnnnnnnnnnnnnnnnnnnnnnnnnnnnnnnnnnnnnnnnnnnnnnnnnnnnnnnnn

SEQ ID NO: 4265 - DNA, 958 bp, Xenorhabdus sp.
  unsure (1)..(958): unsure at all n locations
nnnnnnnnnnnnnnnnnnnnnnnnnnnnnnnnnnnnaagccccgccagcatgcatgaatactgccgctggcgtcacctgtaccccacagaacactgcaggtctcgttgcccccaagtacagtgtggcttcttcaagaacggggttcattccacgaccgctggcagtgtttggacggtaaagccggctccaaacatgacaaccaccccgcccactacacctgccaccagaccaagggaagctctgcctaacattcacgattccccgatggcttccataccgtgaacggctagcgttcgaccaatcggaccgaaaaaaaacacgcggaccttgttgaccatggtggcggggtcaatgcccccagccgcctgcgccgaatattgctggcagcataacaagctgcaaccgatcgcgccggagacgctcggctcgtgcggagccaccaagcgcacannnnnnnnnnnnnnnnnnnnnnnnnnnnnnnnnnnnnnnnnnnnnnnnnnnnnnnnnnnnnnnnnnnnnnnnnnnnnnnnnnnnnnnnnnnnnnnnnnnnnnnnnnnnnnnnnnnnnnnnnnnnnnnnnnnnnnnnnnnnnnnnnnnnnnnnnnnnnnnnnnnnnnnnnnnnnnnnnnnnnnnnnnnnnnnnnnnnnnnnnnnnnnnnnnnnnnnnnnnnnnnnnnnnnnnnnnnnnnnnnnnnnnnnnnnnnnnnnnnnnnnnnnnnnnnnnnnnnnnnnnnnnnnnnnnnnnnnnnnnnnnnnnnnnnnnnnnnnnnnnnnnnnnnnnnnnnnnnnnnnnnnnnnnnnnnnnnnnnnnnnnnnnnnnnnnnnnnnnnnnnnnnnnnnnnnnnnnnnnnnnnnnnnnnnnnnnnnnnnnnnnnnnnnnnnnnnnnnnnnnnnnnnnnnnnnnnnnnnnnnnnnnnnnnnnnnnnnnnnnnnnnnnnnnnnnnnnnnnnnnnnnnnn

SEQ ID NO: 4266 - DNA, 907 bp, Xenorhabdus sp.
  unsure (1)..(907): unsure at all n locations
nnnnnnnnnnnnnnnnnnnnnnnnnnnnnnnngtgctctaaagattgatgccctggagcaatcagaatggcggcggcggcccttggggcggcggcggtggaggaaacaaccagggcggcggtggcggcccgtgggggcaggggcctaaccggcctcgcggcggcggtggcggcaataatggcggcccgcccgatctcgaagagatcatccgccgcagccaggaccgtttcaagaatgtcctgcctggcggcttcaatggcggcgcggttgcgatcctcgtgcttgtcgttctcgtttttctcggcatccagtccgtctataccgttcagccggacgagcgtggcgtggagctgcgtttcggccgtcccaaggacgaaatctcgatgccgggcctgcatttccatctgtggccgatcgagacggtggaaatcgtcaaggtcaccgagcagcagcagaatatcggctcgcgcgcctcgtcttcctcgtcgagcggcgtgatgctgaccggcgaccaaaacatcgtcannnnnnnnnnnnnnnnnnnnnnnnnnnnnnnnnnnnnnnnnnnnnnnnnnnnnnnnnnnnnnnnnnnnnnnnnnnnnnnnnnnnnnnnnnnnnnnnnnnnnnnnnnnnnnnnnnnnnnnnnnnnnnnnnnnnnnnnnnnnnnnnnnnnnnnnnnnnnnnnnnnnnnnnnnnnnnnnnnnnnnnnnnnnnnnnnnnnnnnnnnnnnnnnnnnnnnnnnnnnnnnnnnnnnnnnnnnnnnnnnnnnnnnnnnnnnnnnnnnnnnnnnnnnnnnnnnnnnnnnnnnnnnnnnnnnnnnnnnnnnnnnnnnnnnnnnnnnnnnnnnnnnnnnnnnnnnnnnnnnnnnnnnnnnnnnnnnnnnnnnnnnnnnnnnnnnnnnnnnnnn

SEQ ID NO: 4267 - DNA, 818 bp, Xenorhabdus sp.
  unsure (1)..(818): unsure at all n locations
nnnnnnnnnnnnnnnnnnnnnnnnnnnnnnnnnnnnnnnnnntgatattgtgtcgagtacaccacacttgtgctgtcatggttaaactgaagacttatatacatacctacctatctgttgatcatcatcaacataaacgggactatccagagggcgctggatgcgcccaaatactatcttaattttactgacgaatattttggcccccattagagaaccttgctgatcgcatcccgaatgacaccaaatgtcgcttatataatcctagnnnnnnnnnnnnnnnnnnnnnnnnnnnnnnnnnnnnnnnnnnnnnnnnnnnnnnnnnnnnnnnnnnnnnnnnnnnnnnnnnnnnnnnnnnnnnnnnnnnnnnnnnnnnnnnnnnnnnnnnnnnnnnnnnnnnnnnnnnnnnnnnnnnnnnnnnnnnnnnnnnnnnnnnnnnnnnnnnnnnnnnnnnnnnnnnnnnnnnnnnnnnnnnnnnnnnnnnnnnnnnnnnnnnnnnnnnnnnnnnnnnnnnnnnnnnnnnnnnnnnnnnnnnnnnnnnnnnnnnnnnnnnnnnnnnnnnnnnnnnnnnnnnnnnnnnnnnnnnnnnnnnnnnnnnnnnnnnnnnnnnnnnnnnnnnnnnnnnnnnnnnnnnnnnnnnnnnnnnnnnnnnnnnnnnnnnnnnnnnnnnnnnnnnnnnnnnnnnnnnnnnnnnnnnnnnnnnnnnnnnnnnnnnnnnnnnnnnnnnnnnnnnnnnnnnnnnnnnnnnnnnnnnnnnnnnnnnnnnnnnnnnnnnnnnnnnnnnnnnnnnnnnnnnnnnnnnnnnnnnnnnnnnnnnn

SEQ ID NO: 4268 - DNA, 796 bp, Xenorhabdus sp.
  unsure (1)..(796): unsure at all n locations
nnnnnnnnnnnnnnnnnnnnnnnnnnnnnnnnnnnnnctagcacaagtccgggtgctgcatagacactcacgcatgacggcggacatacttattgatcggttccgctaccgattttgcatcctgaggggccgtagctggccggaacgcaacacccacgcccagatcattcagtctgactagttttacccccatgcagaaaccgtcatgctaccgatccttactcattcccaatcttattacagaaccaggacgttattctctccatgcaacatgcatgcatacagggttcnnnnnnnnnnnnnnnnnnnnnnnnnnnnnnnnnnnnnnnnnnnnnnnnnnnnnnnnnnnnnnnnnnnnnnnnnnnnnnnnnnnnnnnnnnnnnnnnnnnnnnnnnnnnnnnnnnnnnnnnnnnnnnnnnnnnnnnnnnnnnnnnnnnnnnnnnnnnnnnnnnnnnnnnnnnnnnnnnnnnnnnnnnnnnnnnnnnnnnnnnnnnnnnnnnnnnnnnnnnnnnnnnnnnnnnnnnnnnnnnnnnnnnnnnnnnnnnnnnnnnnnnnnnnnnnnnnnnnnnnnnnnnnnnnnnnnnnnnnnnnnnnnnnnnnnnnnnnnnnnnnnnnnnnnnnnnnnnnnnnnnnnnnnnnnnnnnnnnnnnnnnnnnnnnnnnnnnnnnnnnnnnnnnnnnnnnnnnnnnnnnnnnnnnnnnnnnnnnnnnnnnnnnnnnnnnnnnnnnnnnnnnnnnnnnnnnnnnnnnnnnnnnnnnnnnnnnnnnnnnnnnnnnnnnnnnnnnnnnnnnnnnnn

SEQ ID NO: 4269 - DNA, 859 bp, Xenorhabdus sp.
  unsure (1)..(859): unsure at all n locations
nnnnnnnnnnnnnnnnnnnnnnnnnnnnnnnnnnnnnnnnnnnnnnnnnnnntgtttcctataatttctataatgtctcctatattcctatttttattatacatcctgttttctattaattggtggctcttctctaacaacaatggtgttcctatacatacactaacttcctttattatacattaacnnnnnnnnnnnnnnnnnnnnnnnnnnnnnnnnnnnnnnnnnnnnnnnnnnnnnnnnnnnnnnnnnnnnnnnnnnnnnnnnnnnnnnnnnnnnnnnnnnnnnnnnnnnnnnnnnnnnnnnnnnnnnnnnnnnnnnnnnnnnnnnnnnnnnnnnnnnnnnnnnnnnnnnnnnnnnnnnnnnnnnnnnnnnnnnnnnnnnnnnnnnnnnnnnnnnnnnnnnnnnnnnnnnnnnnnnnnnnnnnnnnnnnnnnnnnnnnnnnnnnnnnnnnnnnnnnnnnnnnnnnnnnnnnnnnnnnnnnnnnnnnnnnnnnnnnnnnnnnnnnnnnnnnnnnnnnnnnnnnnnnnnnnnnnnnnnnnnnnnnnnnnnnnnnnnnnnnnnnnnnnnnnnnnnnnnnnnnnnnnnnnnnnnnnnnnnnnnnnnnnnnnnnnnnnnnnnnnnnnnnnnnnnnnnnnnnnnnnnnnnnnnnnnnnnnnnnnnnnnnnnnnnnnnnnnnnnnnnnnnnnnnnnnnnnnnnnnnnnnnnnnnnnnnnnnnnnnnnnnnnnnnnnnnnnnnnnnnnnnnnnnnnnnnnnnnnnnnnnnnnnnnnnnnnnnnnnnnnnnnnnnnnnnnnnnnnnnnnnnnnnnnnnnnnnnnnnnnnnnnnnnnnnnnnnnnnnnnnnnnnnnnnnnnnnnn

SEQ ID NO: 4270 - DNA, 714 bp, Xenorhabdus sp.
  unsure (1)..(714): unsure at all n locations
nnnnnnnnnnnnnnnnnnnnnnnnnnnnnnnnncgggtgaccggcctgaaatgtgtttacgcccatcagtgcgacgggacgttgtttcctgcccaccacgtactgattctttacggttgggggcggaacaacggttcacccgctcgtatgattgaacaccccataacgtgacatcgggcattattttgtgtgaaatattgggaaccagctgcctggatgcatacctgggctaacctgcgcacagggagtgtgaggtatcaatctgtctgatgctacacaacacttttttatgcgctctgccaaccaggggacgaatgcgataaagagtctcatcgaaatcggatgtcatcttcttacacggagagagcggccacataatactcattatgcgaacccttatggtgctctggggagagccccctgacatacttttgctcacccattttnnnnnnnnnnnnnnnnnnnnnnnnnnnnnnnnnnnnnnnnnnnnnnnnnnnnnnnnnnnnnnnnnnnnnnnnnnnnnnnnnnnnnnnnnnnnnnnnnnnnnnnnnnnnnnnnnnnnnnnnnnnnnnnnnnnnnnnnnnnnnnnnnnnnnnnnnnnnnnnnnnnnnnnnnnnnnnnnnnnnnnnnnnnnnnnnnnnnnnnnnnnnnnnnnnnnnnnnnnnnnnnnnnnnnnnnnnnnnnnnnnnnnnnnnnnnnnnnnnnnnnnnnnnn

SEQ ID NO: 4271 - DNA, 899 bp, Xenorhabdus sp.
  unsure (1)..(899): unsure at all n locations
nnnnnnnnnnnnnnnnnnnnnnccaagtgctctaaagtcgcgagcagggcgtcaccttcgccatagtcatcgtcaagccgcacgttttgaacagcggtcatcacgccgacgacgttgcatatagcttgcagccagcattcccgggcgtgccgattgttctcatggcacaaaacagcaggggcgtaccgacatatcgtggccgacgtgatcttgttaattttttgtcgcgggtgccaatgcatgcgataccctggaagcgctacaccctgaactgatcgggaagactagatagatgcttaagacagatacccaccaagcgaattggcggcgtgctaatcctgcaaaatatgaggctcacctttgtggcacgtgccctgaaggcgggcgatcttgaaaaaaacannnnnnnnnnnnnnnnnnnnnnnnnnnnnnnnnnnnnnnnnnnnnnnnnnnnnnnnnnnnnnnnnnnnnnnnnnnnnnnnnnnnnnnnnnnnnnnnnnnnnnnnnnnnnnnnnnnnnnnnnnnnnnnnnnnnnnnnnnnnnnnnnnnnnnnnnnnnnnnnnnnnnnnnnnnnnnnnnnnnnnnnnnnnnnnnnnnnnnnnnnnnnnnnnnnnnnnnnnnnnnnnnnnnnnnnnnnnnnnnnnnnnnnnnnnnnnnnnnnnnnnnnnnnnnnnnnnnnnnnnnnnnnnnnnnnnnnnnnnnnnnnnnnnnnnnnnnnnnnnnnnnnnnnnnnnnnnnnnnnnnnnnnnnnnnnnnnnnnnnnnnnnnnnnnnnnnnnnnnnnnnnnnnnnnnnnnnnnnnnnnnnnnnnnnnnnnnnnnnnnnnnnnnnnnnnnnnnnnnnnnnnnnnnnnnnnnnnnnnnnnnnnnnnnnnnnnnnnnnnnnnnnnnnnnnnnnnnn

SEQ ID NO: 4272 - DNA, 1144 bp, Xenorhabdus sp.
  unsure (1)..(1144): unsure at all n locations
nnnnnnnnnnnnnnnnnnnnnnnnnnnnnnnnnnnnnnnnnnnnnnnnnnnnnnnnnnnnnnnntcagttgcattcgataatgtgcaacacgaatgacgcttttttcttttcatatacctnngcaattgcggacgctttccannnnnnnnnnnnnnnnnnnnnnnnnnnnnnnnnnnnnnnnnnnnnnnnnnnnnnnnnnnnnnnnnnnnnnnnnnnnnnnnnnnnnnnnnnnnnnnnnnnnnnnnnnnnnnnnnnnnnnnnnnnnnnnnnnnnnnnnnnnnnnnnnnnnnnnnnnnnnnnnnnnnnnnnnnnnnnnnnnnnnnnnnnnnnnnnnnnnnnnnnnnnnnnnnnnnnnnnnnnnnnnnnnnnnnnnnnnnnnnnnnnnnnnnnnnnnnnnnnnnnnnnnnnnnnnnnnnnnnnnnnnnnnnnnnnnnnnnnnnnnnnnnnnnnnnnnnnnnnnnnnnnnnnnnnnnnnnnnnnnnnnnnnnnnnnnnnnnnnnnnnnnnnnnnnnnnnnnnnnnnnnnnnnnnnnnnnnnnnnnnnnnnnnnnnnnnnnnnnnnnnnnnnnnnnnnnnnnnnnnnnnnnnnnnnnnnnnnnnnnnnnnnnnnnnnnnnnnnnnnnnnnnnnnnnnnnnnnnnnnnnnnnnnnnnnnnnnnnnnnnnnnnnnnnnnnnnnnnnnnnnnnnnnnnnnnnnnnnnnnnnnnnnnnnnnnnnnnnnnnnnnnnnnnnnnnnnnnnnnnnnnnnnnnnnnnnnnnnnnnnnnnnnnnnnnnnnnnnnnnnnnnnnnnnnnnnnnnnnnnnnnnnnnnnnnnnnnnnnnnnnnnnnnnnnnnnnnnnnnnnnnnnnnnnnnnnnnnnnnnnnnnnnnnnnnnnnnnnnnnnnnnnnnnnnnnnnnnnnnnnnnnnnnnnnnnnnnnnnnnnnnnnnnnnnnnnnnnnnnnnnnnnnnnnnnnnnnnnnnnnnnnnnnnnnnnnnnnnnnnnnnnnnnnnnnnnnnnnnnnnnnnnnnnnnnnnnnnnnnnnnnnnnnnnnnnnnnnnnnnnnnnnnnnnnnnnnnnnnnnnnnnnnnnnnnnnnnnnnnnnnnnnnnnnnnnnnnnnnnnnnnnnnnnnnnnnnnnnnnnnnnnnnnnnnnnnnnnnnnnnn

SEQ ID NO: 4273 - DNA, 946 bp, Xenorhabdus sp.
  unsure (1)..(946): unsure at all n locations
nnnnnnnnnnnnnnnnnnnnnnnnnnnnnnnnnnnnnnnnnnnnntctcactttgtacaggatatcccgtgaatgaagaaatcatggaaataatcttcctttacataattacaccagaaaaatctgctaatttagaccccctctaaaatatatgaatgcaactcccaattcaaacgataataaaccaaaccgaactatctacatacacttaaccgcttcaatcaactctcacatcattaactattgatacttgacaaagtttttacccacattcactatatactaatcttatcaccttacaccttaattatcctatatccgtcccatcaaataaccaacttaccttttcacaattccacaattttttattttttataaaccatcttaccttattaaaatatatttaaattttcnnnnnnnnnnnnnnnnnnnnnnnnnnnnnnnnnnnnnnnnnnnnnnnnnnnnnnnnnnnnnnnnnnnnnnnnnnnnnnnnnnnnnnnnnnnnnnnnnnnnnnnnnnnnnnnnnnnnnnnnnnnnnnnnnnnnnnnnnnnnnnnnnnnnnnnnnnnnnnnnnnnnnnnnnnnnnnnnnnnnnnnnnnnnnnnnnnnnnnnnnnnnnnnnnnnnnnnnnnnnnnnnnnnnnnnnnnnnnnnnnnnnnnnnnnnnnnnnnnnnnnnnnnnnnnnnnnnnnnnnnnnnnnnnnnnnnnnnnnnnnnnnnnnnnnnnnnnnnnnnnnnnnnnnnnnnnnnnnnnnnnnnnnnnnnnnnnnnnnnnnnnnnnnnnnnnnnnnnnnnnnnnnnnnnnnnnnnnnnnnnnnnnnnnnnnnnnnnnnnnnnnnnnnnnnnnnnnnnnnnnnnnnnnnnnnnnnnnnnnnnnnnnnnnnnnnnnnnnnnnnnnnnnnnnnnnnnnnnnnnnnnnnnnnnnnnnnnnnnnnnnnnnnnnnnnnn

SEQ ID NO: 4274 - DNA, 916 bp, Xenorhabdus sp.
  unsure (1)..(916): unsure at all n locations
nnnnnnnnnnnnnnnnnnnnnnnnnnnnnnnnnnnnnnnnnnnnnnnnnnnnnnnnnnncctggctaaaactgacctactgatcgcagaaagcgcaccaaaagtcacctcgtgccgaagcggatccatccatgggataagaaatgtcactggtgcccggacacagcatattattcttcgcattacgcccttcnnnnnnnnnnnnnnnnnnnnnnnnnnnnnnnnnnnnnnnnnnnnnnnnnnnnnnnnnnnnnnnnnnnnnnnnnnnnnnnnnnnnnnnnnnnnnnnnnnnnnnnnnnnnnnnnnnnnnnnnnnnnnnnnnnnnnnnnnnnnnnnnnnnnnnnnnnnnnnnnnnnnnnnnnnnnnnnnnnnnnnnnnnnnnnnnnnnnnnnnnnnnnnnnnnnnnnnnnnnnnnnnnnnnnnnnnnnnnnnnnnnnnnnnnnnnnnnnnnnnnnnnnnnnnnnnnnnnnnnnnnnnnnnnnnnnnnnnnnnnnnnnnnnnnnnnnnnnnnnnnnnnnnnnnnnnnnnnnnnnnnnnnnnnnnnnnnnnnnnnnnnnnnnnnnnnnnnnnnnnnnnnnnnnnnnnnnnnnnnnnnnnnnnnnnnnnnnnnnnnnnnnnnnnnnnnnnnnnnnnnnnnnnnnnnnnnnnnnnnnnnnnnnnnnnnnnnnnnnnnnnnnnnnnnnnnnnnnnnnnnnnnnnnnnnnnnnnnnnnnnnnnnnnnnnnnnnnnnnnnnnnnnnnnnnnnnnnnnnnnnnnnnnnnnnnnnnnnnnnnnnnnnnnnnnnnnnnnnnnnnnnnnnnnnnnnnnnnnnnnnnnnnnnnnnnnnnnnnnnnnnnnnnnnnnnnnnnnnnnnnnnnnnnnnnnnnnnnnnnnnnnnnnnnnnnnnnnnnnnnnnnnnnnnnnnnnnnnnnnnnnnn

SEQ ID NO: 4275 - DNA, 1075 bp, Xenorhabdus sp.
  unsure (1)..(1075): unsure at all n locations
nnnnnnnnnnnnnnnnnnnnnntgctcgttccatgtgctctaaagtttttcagcgccgatttttcggcccgcaattcctcgatggaacgcacgttacggcgcgcagcccccgcccagtcacgggtcttgacgctggatttggcaagccgttccttcgccgccggcacggcatcggcatattgcggcagccagcgcgcctgcgcgacaaccatctcgtccaccatctgccagacctcctccggcgttgcgacggcaccgaccagcgggtcatgcagcacggcaagcttcaagagatcgatatcgccgctcaccgccgcatgcactgacatgcgctgcacattaatcgaggccatgcaggtggcagcgcaggcttccggcagcgtgatgtccgacaccatgttgatgccgaaacggtcgacgaagccgggcgactcgatgatggcgtcagccggcagattgctgatgacaccattgttcttgaggttgaaannnnnnnnnnnnnnnnnnnnnnnnnnnnnnnnnnnnnnnnnnnnnnnnnnnnnnnnnnnnnnnnnnnnnnnnnnnnnnnnnnnnnnnnnnnnnnnnnnnnnnnnnnnnnnnnnnnnnnnnnnnnnnnnnnnnnnnnnnnnnnnnnnnnnnnnnnnnnnnnnnnnnnnnnnnnnnnnnnnnnnnnnnnnnnnnnnnnnnnnnnnnnnnnnnnnnnnnnnnnnnnnnnnnnnnnnnnnnnnnnnnnnnnnnnnnnnnnnnnnnnnnnnnnnnnnnnnnnnnnnnnnnnnnnnnnnnnnnnnnnnnnnnnnnnnnnnnnnnnnnnnnnnnnnnnnnnnnnnnnnnnnnnnnnnnnnnnnnnnnnnnnnnnnnnnnnnnnnnnnnnnnnnnnnnnnnnnnnnnnnnnnnnnnnnnnnnnnnnnnnnnnnnnnnnnnnnnnnnnnnnnnnnnnnnnnnnnnnnnnnnnnnnnnnnnnnnnnnnnnnnnnnnnnnnnnnnnnnnnnnnnnnnnnnnnnnnnnnnnnnnnnnnnnnnnnnnnnnnnnnnnnnnnnnnnnnnnnnnnnnnnnnnnnnnnnnnnnnnnnnnnnnn

SEQ ID NO: 4276 - DNA, 911 bp, Xenorhabdus sp.
  unsure (1)..(911): unsure at all n locations
nnnnnnnnnnnnnnnnnnnnnnnnnnnnnnnnnactgcatcgaggcgcagcaggaggaatcgaaatcgctccgccgcacgcttgaccggctgtccgcgcggattgacagcgacacgaaatcttccgggcgcacccggcacgataacgggagcgaatagccatggcgctggcgcgcaaccgccgccgcgacaggggcgtggattattggccgggttttgtcgatgcgctgtcgacgctgctgatggccatcatgtttttgctgacggtcttcgtgctggcacagttcgttctgtcgcgggaaatcaccggcaaggacgaggtgctgacgcgcctcaacagccagattgccgaattgaccgagcttctggccatggaaaaaggcaataagcaggatatagaggacgcgctggcaagcctgcaatcgacgcttgccgcatccgagaacgagcgttcccgcctgcaagcgctgctcgatgcgggatcgggcagcaatgcgagcgccaatgcgcggatcggcaatctgagcggtgagctggacgagcagcggcaggccaattcccgnnnnnnnnnnnnnnnnnnnnnnnnnnnnnnnnnnnnnnnnnnnnnnnnnnnnnnnnnnnnnnnnnnnnnnnnnnnnnnnnnnnnnnnnnnnnnnnnnnnnnnnnnnnnnnnnnnnnnnnnnnnnnnnnnnnnnnnnnnnnnnnnnnnnnnnnnnnnnnnnnnnnnnnnnnnnnnnnnnnnnnnnnnnnnnnnnnnnnnnnnnnnnnnnnnnnnnnnnnnnnnnnnnnnnnnnnnnnnnnnnnnnnnnnnnnnnnnnnnnnnnnnnnnnnnnnnnnnnnnnnnnnnnnnnnnnnnnnnnnnnnnnnnnnnnnnnnnnnnnnnnnnnnnnnnnnnnnnnnnnnnnnnnnnnn

SEQ ID NO: 4277 - DNA, 983 bp, Xenorhabdus sp.
  unsure (1)..(983): unsure at all n locations
catgtgctctaaagaacagacgacagaggtgcctgcagctctggactgcgcgctgaatccctgaccggatattctcaccgtaaagaccaggcgatcaataccgattaccgctgtctaactcttgctgaccaggattacatagcactggtgagtgctcatttgcatgcatgatatacgccaccctctcattctacgtgcgcaccaatccctggtgcccggtctgctgctataacaacctcattacattcatattgatgttctcataccttctcctcttcaccaatnnnnnnnnnnnnnnnnnnnnnnnnnnnnnnnnnnnnnnnnnnnnnnnnnnnnnnnnnnnnnnnnnnnnnnnnnnnnnnnnnnnnnnnnnnnnnnnnnnnnnnnnnnnnnnnnnnnnnnnnnnnnnnnnnnnnnnnnnnnnnnnnnnnnnnnnnnnnnnnnnnnnnnnnnnnnnnnnnnnnnnnnnnnnnnnnnnnnnnnnnnnnnnnnnnnnnnnnnnnnnnnnnnnnnnnnnnnnnnnnnnnnnnnnnnnnnnnnnnnnnnnnnnnnnnnnnnnnnnnnnnnnnnnnnnnnnnnnnnnnnnnnnnnnnnnnnnnnnnnnnnnnnnnnnnnnnnnnnnnnnnnnnnnnnnnnnnnnnnnnnnnnnnnnnnnnnnnnnnnnnnnnnnnnnnnnnnnnnnnnnnnnnnnnnnnnnnnnnnnnnnnnnnnnnnnnnnnnnnnnnnnnnnnnnnnnnnnnnnnnnnnnnnnnnnnnnnnnnnnnnnnnnnnnnnnnnnnnnnnnnnnnnnnnnnnnnnnnnnnnnnnnnnnnnnnnnnnnnnnnnnnnnnnnnnnnnnnnnnnnnnnnnnnnnnnnnnnnnnnnnnnnnnnnnnnnnnnnnnnnnnnnnnnnnnnnnnnnnnnnnnnnnnnnnnnnnnnnnnnnnnnnnnnnnnnnnnnnnnnnnnnnnnnnnnnnnnnnnnnnnnnnnnnnnnnnnnnnnnn

SEQ ID NO: 4278 - DNA, 921 bp, Xenorhabdus sp.
  unsure (1)..(921): unsure at all n locations
nnnnnnnnnnnnnnnnnnnnnnnnnnnnnnnnnnnnnnnnnnccgcagagttagcccttgtggtccccgcagttggcggagtggtggcattgactgctgcttctgttgtcctgtcgggcggtgtggctctggccgtgccgggactgatcgccacggtcgcggggcgagccacaaacgttaaccgcgggctggcgctcgccatctacagcttctgtctgtttctcggtgcgagcttcacgccgcccgtcacgcagtcgctcgtcagcttcggcttgttgccactttggctcctgcctgccggacttctgctcacagccgctatcggcatcaccaccacgaaccgccgtccacaaaccgcaactcagcattgaaagaggagattgttatgccccgtaccctgtcagcgataaccgccaccgacctcggtctcattgccggaagcgccggcacctccctggcggatactaagaaaggaaatgccatgaccgtcgcaagtcccgtaatcgaatctgccgatgccatcgttgccaagaacataccagccnnnnnnnnnnnnnnnnnnnnnnnnnnnnnnnnnnnnnnnnnnnnnnnnnnnnnnnnnnnnnnnnnnnnnnnnnnnnnnnnnnnnnnnnnnnnnnnnnnnnnnnnnnnnnnnnnnnnnnnnnnnnnnnnnnnnnnnnnnnnnnnnnnnnnnnnnnnnnnnnnnnnnnnnnnnnnnnnnnnnnnnnnnnnnnnnnnnnnnnnnnnnnnnnnnnnnnnnnnnnnnnnnnnnnnnnnnnnnnnnnnnnnnnnnnnnnnnnnnnnnnnnnnnnnnnnnnnnnnnnnnnnnnnnnnnnnnnnnnnnnnnnnnnnnnnnnnnnnnnnnnnnnnnnnnnnnnnnnnnnnnnnnnnnnnnnnnnnnnnnnnnnnnnnnnnnnnnnn

SEQ ID NO: 4279 - DNA, 934 bp, Xenorhabdus sp.
  unsure (1)..(934): unsure at all n locations
nnnnnnnnnnnnnnnnnnnnnnnnnnnngtgctctaaagcatacggacggtcatcaacgcttgccgtccgcatggtctgcttgatctggatgatcaaatatgtcaactggtgaccacgacaggcgtattgtccaatcaaactgtgacagtttgcgttcttaatgccgtgggaacggccgttgacacagcgttcaaggccaccgtcacctcaataaggtgacttatgccgttcccggcaccagctatccgagcaactgcacagccgtccatttcgacatggttgtgccggcacttacccattcgggttcccggaccttgcagatttcggtggaaggcgcggacgagacctacacactacctgcagcctttctgcttgttgtgtgagggcggcacatgtcacgatattttcgttacagcccgggccgattggcccgtggtattgaaagtgcgctaccgctcgtcgtttacggccttgtcgctttatgtctggggacaacaccggcacgtctgaaggtgaactactgcacaaccccgccgctgtcgacaacaccaatattgccaagcagtttcagtgcggtaaatcatgcgcaaggggcgcattgcattgcagcagttcatatcaccgaactgnnnnnnnnnnnnnnnnnnnnnnnnnnnnnnnnnnnnnnnnnnnnnnnnnnnnnnnnnnnnnnnnnnnnnnnnnnnnnnnnnnnnnnnnnnnnnnnnnnnnnnnnnnnnnnnnnnnnnnnnnnnnnnnnnnnnnnnnnnnnnnnnnnnnnnnnnnnnnnnnnnnnnnnnnnnnnnnnnnnnnnnnnnnnnnnnnnnnnnnnnnnnnnnnnnnnnnnnnnnnnnnnnnnnnnnnnnnnnnnnnnnnnnnnnnnnnnnnnnnnnnnnnnnnnnnnnnnnnnnnnnnnnnnnnnnnnnnnnnnnnnnn

SEQ ID NO: 4280 - DNA, 927 bp, Xenorhabdus sp.
  unsure (1)..(927): unsure at all n locations
nnnnnnnnnnnnnnnnnnnnnnnnnnnnnnnnnnnnntctcgcttggcatggcgctgacgaaatataccattcgcggcaatatgggcattgccgtcaccatgacggttttcaagctgctgctgctgcccgcctgtgtatgggccatgggccatgttctcggcctcagccgcgaatggacggcggcgcttgttctcacctcatcggttccgacaggggtgaatgcctggctgattgccaaccgcttcggtattggccacagcgttgcggcctccaccatcagcatttccacggcgaccggcgttctttccgtgtcgctgtgggcatggctgttgagctgattattctgtcgagttgattatttctgtgcgctcagaatcttgaagcgggcgttgcggcacacttcagtgctggtgcggaattcagccgcgagcaccggctcatagggcatgccgcgattggcgaccatcagcagcttgccaccgctgcgcagcgcgccggcggcagcctttatgaaagcctgaccgaaggcaagttctgccgcctgtcccgccgcatggaaaggcgggttcatgatgatcaagtcgtattttttcnnnnnnnnnnnnnnnnnnnnnnnnnnnnnnnnnnnnnnnnnnnnnnnnnnnnnnnnnnnnnnnnnnnnnnnnnnnnnnnnnnnnnnnnnnnnnnnnnnnnnnnnnnnnnnnnnnnnnnnnnnnnnnnnnnnnnnnnnnnnnnnnnnnnnnnnnnnnnnnnnnnnnnnnnnnnnnnnnnnnnnnnnnnnnnnnnnnnnnnnnnnnnnnnnnnnnnnnnnnnnnnnnnnnnnnnnnnnnnnnnnnnnnnnnnnnnnnnnnnnnnnnnnnnnnnnnnnnnnnnnnnnnnnnnnnnnnnnnnnnnnnnnnnnnnnnnnnnnnnnnnnnnnnnnnnnn

SEQ ID NO: 4281 - DNA, 1003 bp, Xenorhabdus sp.
  unsure (1)..(1003): unsure at all n locations
nnnnnnnnnnnnnnnnnnnnnnnnngccctacagataaggccgcgccaccagaccctatcgaggcgcgggttttgcccgcgcctttttttcgtttttattatcgtttgtcttttcgggaaaaccggtttcgacttttccctgacaaactccatcctacctcgaggacgctcccatgagccgtgacgccgtgaaaacccttttccatccctttgcctccgacatgcttgccatgccgaaagagggcgaacgcgttctgtttctgggagcggaagccggtccgcggctggatggtttcgacgcggagatcgtcgcggttcagcatcttcggccgctttaccgggcccttgaggctcagggcgcgaaagtcaccccggatgtttcgggcgaagattacgatgcggcgctgctgctttgcggcaaacatcgtggcgagaacgaaaatcgtgtcgccgaagcactttcgcgggtgaaggccggcggcctgatcgtcgcagccggatcgaaggaagacggtattctgacgctgcgcaagacactgacgaagctcggcatcgagacggaatcgacgccgaaatatcacggcgtcgcgctctggttcaaacggccggacgatgtctcgaccactgtttccaagcttgcccaaaagcctgcgacnnnnnnnnnnnnnnnnnnnnnnnnnnnnnnnnnnnnnnnnnnnnnnnnnnnnnnnnnnnnnnnnnnnnnnnnnnnnnnnnnnnnnnnnnnnnnnnnnnnnnnnnnnnnnnnnnnnnnnnnnnnnnnnnnnnnnnnnnnnnnnnnnnnnnnnnnnnnnnnnnnnnnnnnnnnnnnnnnnnnnnnnnnnnnnnnnnnnnnnnnnnnnnnnnnnnnnnnnnnnnnnnnnnnnnnnnnnnnnnnnnnnnnnnnnnnnnnnnnnnnnnnnnnnnnnnnnnnnnnnnnnnnnnnnnnnnnnnnnnnnnnnnnnnnnnnnnnnnnnnnnnnnnnnnnnnnnnnnnnnnnnnnnnn

SEQ ID NO: 4282 - DNA, 920 bp, Xenorhabdus sp.
  unsure (1)..(920): unsure at all n locations
nnnnnnnnnnnnnnnnnnnnnnnnnnnnnnnnnnnnnnnnnnnnnnnntgaggcggtcgctgatctgatataacaagagctgggtgccgaggagactctgttctttctggctgagtctggccaactgaggagaatttctacgctataccctgagcccgagcagatgatcggctagggatacatgctgtacaagcttaggatcatgtgggacatgtaacttgttttgatggtacgccggcccccatagtgatgacctgctgccctcttgtaaagaaagatggccgctgcgaatatgctannnnnnnnnnnnnnnnnnnnnnnnnnnnnnnnnnnnnnnnnnnnnnnnnnnnnnnnnnnnnnnnnnnnnnnnnnnnnnnnnnnnnnnnnnnnnnnnnnnnnnnnnnnnnnnnnnnnnnnnnnnnnnnnnnnnnnnnnnnnnnnnnnnnnnnnnnnnnnnnnnnnnnnnnnnnnnnnnnnnnnnnnnnnnnnnnnnnnnnnnnnnnnnnnnnnnnnnnnnnnnnnnnnnnnnnnnnnnnnnnnnnnnnnnnnnnnnnnnnnnnnnnnnnnnnnnnnnnnnnnnnnnnnnnnnnnnnnnnnnnnnnnnnnnnnnnnnnnnnnnnnnnnnnnnnnnnnnnnnnnnnnnnnnnnnnnnnnnnnnnnnnnnnnnnnnnnnnnnnnnnnnnnnnnnnnnnnnnnnnnnnnnnnnnnnnnnnnnnnnnnnnnnnnnnnnnnnnnnnnnnnnnnnnnnnnnnnnnnnnnnnnnnnnnnnnnnnnnnnnnnnnnnnnnnnnnnnnnnnnnnnnnnnnnnnnnnnnnnnnnnnnnnnnnnnnnnnnnnnnnnnnnnnnnnnnnnnnnnnnnnnnnnnnnnnnnnnnnnnnnnnnnnnnnnnnnnnnnnnnnnnnnnnnnnnnnnnnnnnnnn

SEQ ID NO: 4283 - DNA, 883 bp, Xenorhabdus sp.
  unsure (1)..(883): unsure at all n locations
nnnnnnnnnnnnnnnnnnnnnnnnnnnnnnnnnnnnnnnnnntgctctaaagggcctggcttacttggacgggcccatatcaaaatcactccttaacttaccgggatcacgagcacccgccttggggccaacaacacgaggcacgaccactgaagcttcctgcctctgggaatggatgccctttatctgcgcaaactggagccctcgagggtaccnnnnnnnnnnnnnnnnnnnnnnnnnnnnnnnnnnnnnnnnnnnnnnnnnnnnnnnnnnnnnnnnnnnnnnnnnnnnnnnnnnnnnnnnnnnnnnnnnnnnnnnnnnnnnnnnnnnnnnnnnnnnnnnnnnnnnnnnnnnnnnnnnnnnnnnnnnnnnnnnnnnnnnnnnnnnnnnnnnnnnnnnnnnnnnnnnnnnnnnnnnnnnnnnnnnnnnnnnnnnnnnnnnnnnnnnnnnnnnnnnnnnnnnnnnnnnnnnnnnnnnnnnnnnnnnnnnnnnnnnnnnnnnnnnnnnnnnnnnnnnnnnnnnnnnnnnnnnnnnnnnnnnnnnnnnnnnnnnnnnnnnnnnnnnnnnnnnnnnnnnnnnnnnnnnnnnnnnnnnnnnnnnnnnnnnnnnnnnnnnnnnnnnnnnnnnnnnnnnnnnnnnnnnnnnnnnnnnnnnnnnnnnnnnnnnnnnnnnnnnnnnnnnnnnnnnnnnnnnnnnnnnnnnnnnnnnnnnnnnnnnnnnnnnnnnnnnnnnnnnnnnnnnnnnnnnnnnnnnnnnnnnnnnnnnnnnnnnnnnnnnnnnnnnnnnnnnnnnnnnnnnnnnnnnnnnnnnnnnnnnnnnnnnnnnnnnnnnnnnnnnnnnnnnnnnnnnnnnnnnnnnnnnnnnnnnnnnnnnnnnnnnnnnn

SEQ ID NO: 4284 - DNA, 989 bp, Xenorhabdus sp.
  unsure (1)..(989): unsure at all n locations
nnnnnnnnnnnnnnnnnnnnnnnnnnnnnnnnnnnnnnnnnnnnnnnnnnnnnnnnnnnnnnnnnnncatccataaacatattactcggcccggttttatatcccttaaccgcagaatttggcagaagagcggatatattcacaaggggggcaatattcaagatcacacgcctttccgttggatcgcccaataccgccatatggaaagcaggaactaaaggtgcaccttgaccgccataagccatatcacggcggcgaaaatcaccgactgtcgtgatatcggttaatgccgttacacggttattgtcaccaatttgcatcgtaaatggcttttcaccatccggttcatgccatacagtctgaccatgacacccaattgcagtgatatcattcgcagttaatccggtcttctttaataaccctttgacttgattctgcaaaaagcgttcccaactcataattgagctgcccaactggtgataatgtagtttgctggccttgacaaatcgccagtaatttttgcttaagctccttatgaaaccgatggctgtaattttcctttttgnnnnnnnnnnnnnnnnnnnnnnnnnnnnnnnnnnnnnnnnnnnnnnnnnnnnnnnnnnnnnnnnnnnnnnnnnnnnnnnnnnnnnnnnnnnnnnnnnnnnnnnnnnnnnnnnnnnnnnnnnnnnnnnnnnnnnnnnnnnnnnnnnnnnnnnnnnnnnnnnnnnnnnnnnnnnnnnnnnnnnnnnnnnnnnnnnnnnnnnnnnnnnnnnnnnnnnnnnnnnnnnnnnnnnnnnnnnnnnnnnnnnnnnnnnnnnnnnnnnnnnnnnnnnnnnnnnnnnnnnnnnnnnnnnnnnnnnnnnnnnnnnnnnnnnnnnnnnnnnnnnnnnnnnnnnnnnnnnnnnnnnnnnnnnnnnnnnnnnnnnnnnnnnnnnnnnnnnnnnnnnnnnnnnnnnnnnnnnnnnnnnnnnnnnnnnnnnnnnnnnnnn

SEQ ID NO: 4285 - DNA, 949 bp, Xenorhabdus sp.
  unsure (1)..(949): unsure at all n locations
nnnnnnnnnnnnnnnnnnnnnnnnnnnnnntgctctaaaggatcgacatctagatcatcgcttatcgaggacggacgacgcagggcacaggaggtggtgcccggcataacctggccggaaggccgggtaaggcgtgggcacacgtgtcgtcacattgatcaaacggaaagggagttacgcgtttgaaaacgttcaagtcaaaattcgtgaagatggcagccgtcgtcgcattggcggccggcatcacgaacccggttctggccgaagacagcaagacgctgccgatcgccgcgcagatgtacacactgcgcaatgcgggaacacttgaggagcagcttgccatcctcaaccgcgctggcgtttcggcagtcgaaacggtggatatgcagaaggtcagcgccagcgaactgaacgcgcttctggaaaagcacaagatcaaggtcatttcctcgcatgtgccgatcgacaagctgcgcggtaacctcgatgaggtcatcaccgaacagaaagccgtcggcaatcccgtcgtgaccgtgccgttcctgaagccgnnnnnnnnnnnnnnnnnnnnnnnnnnnnnnnnnnnnnnnnnnnnnnnnnnnnnnnnnnnnnnnnnnnnnnnnnnnnnnnnnnnnnnnnnnnnnnnnnnnnnnnnnnnnnnnnnnnnnnnnnnnnnnnnnnnnnnnnnnnnnnnnnnnnnnnnnnnnnnnnnnnnnnnnnnnnnnnnnnnnnnnnnnnnnnnnnnnnnnnnnnnnnnnnnnnnnnnnnnnnnnnnnnnnnnnnnnnnnnnnnnnnnnnnnnnnnnnnnnnnnnnnnnnnnnnnnnnnnnnnnnnnnnnnnnnnnnnnnnnnnnnnnnnnnnnnnnnnnnnnnnnnnnnnnnnnnnnnnnnnnnnnnnnnnnnnnnnnnnnnnnnnnnnnnnnnnnnnnnnnnnnnnnnnnnnnnnnnnn

SEQ ID NO: 4286 - DNA, 902 bp, Xenorhabdus sp.
  unsure (1)..(902): unsure at all n locations
nnnnnnnnnnnnnnnnnnnnnnnnnnnnnngtgctctaaagatctcgggccaaagggcacagcatgagcgcccagacggtgtagacgcatacatgccccaccggacatatgaggatcccgtattcaacacagtcatgaactgacaatattgccggggctgctgatactgtattacaccctgcacccaccctcattgggggggcgtgagggggagatacgtttgactttgtgctggacacaatgtgagaggccgccgcatgcaaagatattggagagtgcagatgttttactcacgaatcttcgaccgaaaggacgcatgacctgaccgcactatgaatgaaaggcgacgatctgattgagacttacaccgcagtgccgactgttaatcaaaaggagccacctgaggaccagcctgaatatgctannnnnnnnnnnnnnnnnnnnnnnnnnnnnnnnnnnnnnnnnnnnnnnnnnnnnnnnnnnnnnnnnnnnnnnnnnnnnnnnnnnnnnnnnnnnnnnnnnnnnnnnnnnnnnnnnnnnnnnnnnnnnnnnnnnnnnnnnnnnnnnnnnnnnnnnnnnnnnnnnnnnnnnnnnnnnnnnnnnnnnnnnnnnnnnnnnnnnnnnnnnnnnnnnnnnnnnnnnnnnnnnnnnnnnnnnnnnnnnnnnnnnnnnnnnnnnnnnnnnnnnnnnnnnnnnnnnnnnnnnnnnnnnnnnnnnnnnnnnnnnnnnnnnnnnnnnnnnnnnnnnnnnnnnnnnnnnnnnnnnnnnnnnnnnnnnnnnnnnnnnnnnnnnnnnnnnnnnnnnnnnnnnnnnnnnnnnnnnnnnnnnnnnnnnnnnnnnnnnnnnnnnnnnnnnnnnnnnnnnnnnnnnnnnnnnnnnnnnnnnnnnnnnnnnnnnnnnnn

SEQ ID NO: 4287 - DNA, 996 bp, Xenorhabdus sp.
  unsure (1)..(996): unsure at all n locations
nnnnnnnnnnnnnnnnnnnnnnnnnnnnnnnnnnnnctgctttccacaggtcgtcgcaagcgacaaactgacccggcttgattctccagtatggccaacctctctacacctctacagagctgagagctgcggaacagaatactgtacgtcatgtcaccaatctttccgcagaagaaagcttcggcgttccgggaaccattgttgatatggtcgccgatagaggcattttcacaccggagctcagaggagcattacattatctgtctaggcgaaatcgagcttccactatggtgggcgtagcgggttccgcaaaaacaagtgtacttggagccctgaacgaagcggtggacaggttcaacgaggaagcgctcccgaccgagaaaataaagttgattgccttcgtacccaccaaccgggcggcccaggagcttcgtgagaaaggtcttcgcgacgtcgcgacgacttttaaggcgaaagaccgcaccatcggaaaaaataccatcgtcgtgatcgacgaaatgtcgatggccaagacgcaagaaaacgcgnnnnnnnnnnnnnnnnnnnnnnnnnnnnnnnnnnnnnnnnnnnnnnnnnnnnnnnnnnnnnnnnnnnnnnnnnnnnnnnnnnnnnnnnnnnnnnnnnnnnnnnnnnnnnnnnnnnnnnnnnnnnnnnnnnnnnnnnnnnnnnnnnnnnnnnnnnnnnnnnnnnnnnnnnnnnnnnnnnnnnnnnnnnnnnnnnnnnnnnnnnnnnnnnnnnnnnnnnnnnnnnnnnnnnnnnnnnnnnnnnnnnnnnnnnnnnnnnnnnnnnnnnnnnnnnnnnnnnnnnnnnnnnnnnnnnnnnnnnnnnnnnnnnnnnnnnnnnnnnnnnnnnnnnnnnnnnnnnnnnnnnnnnnnnnnnnnnnnnnnnnnnnnnnnnnnnnnnnnnnnnnnnnnnnnnnnnnnnnnnnnnnnnnnnnnnnnnnnnnnnnnnnnnnnnnnnnnnnnnnnnnnnnnn

SEQ ID NO: 4288 - DNA, 912 bp, Xenorhabdus sp.
  unsure (1)..(912): unsure at all n locations
nnnnnnnnnnnnnnnnnnnnnnnnnnaaagttgactagagttggtcaatgaggccgaatacgatcgaaaaagtgtttcccgagagcgttttcccgggcaacaaatacagcgcagcataagcgaaaggcgcaacaagcgtcgtgtaaaactttgctgaatgcaaaaccgtttcacatttttgccgattttttgccgcgatggcgaaaaatattatggggttttagacgattttttcgtttggaaggaacgaggcaaggggaccattgcaatctcctcatccgtcattccggctcaaggccggaatgacggacaggttgagggccttcgttgcaaactctcgacagcgaaacgtggaaaaaaacgagtgtcaggccgtcaaaagctcgggcacttagacaccggccacggcatcggcgatggtggtgttgaaaaggatgttgcgcgtcgcatcggccacgcgggcnnnnnnnnnnnnnnnnnnnnnnnnnnnnnnnnnnnnnnnnnnnnnnnnnnnnnnnnnnnnnnnnnnnnnnnnnnnnnnnnnnnnnnnnnnnnnnnnnnnnnnnnnnnnnnnnnnnnnnnnnnnnnnnnnnnnnnnnnnnnnnnnnnnnnnnnnnnnnnnnnnnnnnnnnnnnnnnnnnnnnnnnnnnnnnnnnnnnnnnnnnnnnnnnnnnnnnnnnnnnnnnnnnnnnnnnnnnnnnnnnnnnnnnnnnnnnnnnnnnnnnnnnnnnnnnnnnnnnnnnnnnnnnnnnnnnnnnnnnnnnnnnnnnnnnnnnnnnnnnnnnnnnnnnnnnnnnnnnnnnnnnnnnnnnnnnnnnnnnnnnnnnnnnnnnnnnnnnnnnnnnnnnnnnnnnnnnnnnnnnnnnnnnnnnnnnnnnnnnnnnnnnnnnnnnnnnnnnnnnnnnnnnnnnn

SEQ ID NO: 4289 - DNA, 923 bp, Xenorhabdus sp.
  unsure (1)..(923): unsure at all n locations
nnnnnnnnnnnnnnnnnnnnnnnnnnnnnnnnnnnnncaggtcaaaaaccccgagcgaggggatgagaccaacgagcggcgaggacgacgtcacgacggcttcctgaacgccggagcgcagggcctgtgtcgcctgaaggtcaccgccgagagcgccgccccagaatgccgtcagcttcagcttgccgcccgacttgtcatcgaggcaggcctgcatggcctggatgccgttgccgaccgggtggtcctggttgatgccgttcgaaacgcggatgttacggctgttgaattcggccattgccggagctgcggcgccaacggcgaaagcgatggccgtggtggtcagaagaagctttctcataatatcctcccttggattgtgttcgagaagcggttgcggattaacgaagatactgcagcggtacgaggacgatgtccgggaaaatcacgagcagcgccagaacgatggtttcggcaacgaggaacggccagacaccgatcgtgaccttgccgagcgggatgcgnnnnnnnnnnnnnnnnnnnnnnnnnnnnnnnnnnnnnnnnnnnnnnnnnnnnnnnnnnnnnnnnnnnnnnnnnnnnnnnnnnnnnnnnnnnnnnnnnnnnnnnnnnnnnnnnnnnnnnnnnnnnnnnnnnnnnnnnnnnnnnnnnnnnnnnnnnnnnnnnnnnnnnnnnnnnnnnnnnnnnnnnnnnnnnnnnnnnnnnnnnnnnnnnnnnnnnnnnnnnnnnnnnnnnnnnnnnnnnnnnnnnnnnnnnnnnnnnnnnnnnnnnnnnnnnnnnnnnnnnnnnnnnnnnnnnnnnnnnnnnnnnnnnnnnnnnnnnnnnnnnnnnnnnnnnnnnnnnnnnnnnnnnnnnnnnnnnnnnnnnnnnnnnnnnnnnnnnnnnnnnnnnnnnnnnnnnnnnnn

SEQ ID NO: 4290 - DNA, 1002 bp, Xenorhabdus sp.
  unsure (1)..(1002): unsure at all n locations
nnnnnnnnnnnnnnnnnnnnnnnnnnnnnnnnnnnnnnnnnnnnnnnnnnnnnnnnnnnnnnnnnnnnnnnnnnnnnnnnnnnnnnnnnnnnnnnnnnnnnnnnnnnnnnaatttgcataggaacactaggatgaacagagcgcctacctgacgaccttaaacgaggagctcgctagcataaggctgagggccattaattccaggatcaaccaaaatcataccgctcatctgaccattaaccgagatgatatgcttgacattataaacgcggtctatgcaatccacttactctaatgggccatgtgtgagatagaactctacctgagaacagcagagggtgacaccacgggctctgattccttgcgctagaaatatcagaacgatatcacatgctagtaacaccgctggtctgtgacagaacggatgccatggctttcttcaataaaggccaaccgatgtcaaaaatannnnnnnnnnnnnnnnnnnnnnnnnnnnnnnnnnnnnnnnnnnnnnnnnnnnnnnnnnnnnnnnnnnnnnnnnnnnnnnnnnnnnnnnnnnnnnnnnnnnnnnnnnnnnnnnnnnnnnnnnnnnnnnnnnnnnnnnnnnnnnnnnnnnnnnnnnnnnnnnnnnnnnnnnnnnnnnnnnnnnnnnnnnnnnnnnnnnnnnnnnnnnnnnnnnnnnnnnnnnnnnnnnnnnnnnnnnnnnnnnnnnnnnnnnnnnnnnnnnnnnnnnnnnnnnnnnnnnnnnnnnnnnnnnnnnnnnnnnnnnnnnnnnnnnnnnnnnnnnnnnnnnnnnnnnnnnnnnnnnnnnnnnnnnnnnnnnnnnnnnnnnnnnnnnnnnnnnnnnnnnnnnnnnnnnnnnnnnnnnnnnnnnnnnnnnnnnnnnnnnnnnnnnnnnnnnnnnnnnnnnnnnnnnnnnnnnnnnnnnnnnnnnnnnnnnnnnnnnnnnnnnnnnnnnnnnnnnnnnnnnnnnnnnnnnnnnnnnnnnnnnnnnnnnnnnnn

SEQ ID NO: 4291 - DNA, 700 bp, Xenorhabdus sp.
  unsure (1)..(700): unsure at all n locations
nnnnnnnnnnnnnnnnnnnnnnnnnnnnnnnnnnnngtgctctaaagataatatattcaaaaaaactagatttatctctctggatgcagtagaagaggtacttttcgaattagtatgagtgattcacggacagtaccacactgtctttatatgaatccattttgactgtctaaccggatatgatattattttacctgattaaaatagagaagcttacttctctaaatccgaataaagcccggattgtcagctttacagcctctttatatatgcgacacattagcgggagtaaatataattatttttacaaatcgcggctaattatttacaatgaaatagttttatttcctcgagtgcgtagaaagagtcgttgtttaaatgaaacctgagcagataaattgattgatatctacatgctataagcatcaaatgcgctagcattatcatcattcgccaaaaaaacgtaagcgattgcttgaaatttatacagtactctaggagcatatttaaggatttgtactagacattatgggaccgccgtgtgcgtacaattcttggttagctgcggatagccagaattggttctcctttgatgcnnnnnnnnnnnnnnnnnnnnnnnnnnnnnnnnnnnnnnnnnnnnnnnnnnnnnnnnnnnnnnnnnnnnnnnnnnnnnnnnnnnnnnnnnnnnnnnnnnnnnnnn

SEQ ID NO: 4292 - DNA, 667 bp, Xenorhabdus sp.
  unsure (1)..(667): unsure at all n locations
nnnnnnnnnnnnnnnnnnnnnnnnnnnnnnnnnnnnnnnnnttattggaccttttgcatatcaaagggtataaaaaacgtaactggagatcactgatgggtgcatggcgctgtatggcatgaaccgtgggaaaagccttcatgcaatgtgacaatacctgtacggttaccgattacacgtgggatttccgcggatatggttatggggcaaggccctttattctgtttccatatggggattggcatccacgaaaggcgggatcttaatattgcggattgcaattttcgtctttgcaatttgngtaggattgatccggccggtatatgtgaggatgccgactgggtcataaacacacctatgataagagccaagggctaaaagtagtaacaacttgcttaaaatgcttaatccttttgcactactgacaaaacaccgcgaatattaatatgatggtgaaacactgnnnnnnnnnnnnnnnnnnnnnnnnnnnnnnnnnnnnnnnnnnnnnnnnnnnnnnnnnnnnnnnnnnnnnnnnnnnnnnnnnnnnnnnnnnnnnnnnnnnnnnnnnnnnnnnnnnnnnnnnnnnnnnnnnnnnnnnnnnnnnnnnnnnnnnnnnnnnnnnnnnnnnnnnnnnnnnnnnnnnnnnnnnnnnnnnnnnnnnnnnnnn

SEQ ID NO: 4293 - DNA, 1009 bp, Xenorhabdus sp.
  unsure (1)..(1009): unsure at all n locations
nnnnnnnnnnnnnnnnnnnnnnnnnnnnnnnnnnnnnntgctctaaattcggtaaaaataagaatatcatttaagcaaaataaaatgtatctaagagttgtaatcatttcagtatgagaaaatatgatgattttatctttctggttagatgaataatctacttttttatttttatgctttattttgctatttcacggttcaattttaagaacagggattacgtgtaatgagtttgctggataccttatgtcagtcctgttttggtgatgatcacaccaaatccgatgagctggcacaaaaacagatcgccatctgggaaaaatggcttattccgattactgctgagcagccggttggcagtgatccgggttactatgatgattttgaacggatgcgtgaagaagttaataaactctcaggcgctgttacagaattaatnnnnnnnnnnnnnnnnnnnnnnnnnnnnnnnnnnnnnnnnnnnnnnnnnnnnnnnnnnnnnnnnnnnnnnnnnnnnnnnnnnnnnnnnnnnnnnnnnnnnnnnnnnnnnnnnnnnnnnnnnnnnnnnnnnnnnnnnnnnnnnnnnnnnnnnnnnnnnnnnnnnnnnnnnnnnnnnnnnnnnnnnnnnnnnnnnnnnnnnnnnnnnnnnnnnnnnnnnnnnnnnnnnnnnnnnnnnnnnnnnnnnnnnnnnnnnnnnnnnnnnnnnnnnnnnnnnnnnnnnnnnnnnnnnnnnnnnnnnnnnnnnnnnnnnnnnnnnnnnnnnnnnnnnnnnnnnnnnnnnnnnnnnnnnnnnnnnnnnnnnnnnnnnnnnnnnnnnnnnnnnnnnnnnnnnnnnnnnnnnnnnnnnnnnnnnnnnnnnnnnnnnnnnnnnnnnnnnnnnnnnnnnnnnnnnnnnnnnnnnnnnnnnnnnnnnnnnnnnnnnnnnnnnnnnnnnnnnnnnnnnnnnnnnnnnnnnnnnnnnnnnnnnnnnnnnnnnnnnnnnnnnnnnnnnnnnnnnnnnnnnnnnnnnnnn

SEQ ID NO: 4294 - DNA, 1052 bp, Xenorhabdus sp.
  unsure (1)..(1052): unsure at all n locations
nnnnnnnnnnnnnnnnnnnnnnnnnnnnnnnnnntgtgccctaaagcgacaacgcttcgccgtctccaataatggcctcccccagactgcggccgatttcagcctgcaataccggaagtggaatctttaattcctcgaatgtttccgcatacataccggcatctacaaccgccagcagccaatgcgggatatccacgtacctgtgacccatgcgcaccgcgatagaagccgcggcttcaagggtaacgcgcaggtcaggctcaagcgcttcaatgaggcgattgagatcgatatgcgacatgcaatgagcctcctgccccggtccattccacaacgtgacgtggaataactatgacgatgaaaccgcattgtccaccccgaagtttattttttatcaggtgagattaggcagtagacgccacaatttagacacattttgaataagtctgtctgaggaatagcctcacgtaagggaagtaactacaaaaaatcaattactattttctggagatagactgctcttgaacgcgccgcatgttaaaagagatatagaatttttgggagattgcggagaaaatatccgcatcgacgcaagaacgcgtgaaatatactatagaattaaggatgnnnnnnnnnnnnnnnnnnnnnnnnnnnnnnnnnnnnnnnnnnnnnnnnnnnnnnnnnnnnnnnnnnnnnnnnnnnnnnnnnnnnnnnnnnnnnnnnnnnnnnnnnnnnnnnnnnnnnnnnnnnnnnnnnnnnnnnnnnnnnnnnnnnnnnnnnnnnnnnnnnnnnnnnnnnnnnnnnnnnnnnnnnnnnnnnnnnnnnnnnnnnnnnnnnnnnnnnnnnnnnnnnnnnnnnnnnnnnnnnnnnnnnnnnnnnnnnnnnnnnnnnnnnnnnnnnnnnnnnnnnnnnnnnnnnnnnnnnnnnnnnnnnnnnnnnnnnnnnnnnnnnnnnnnnnnnnnnnnnnnnnnnnnnnnnnnnnnnnnnnnnnnnnnnnnnnnnnnnnnnnnnnnnnnnnnnnnnnnnnnnnnnnnnnnnnnnnnnnnnnnnnn

SEQ ID NO: 4295 - DNA, 1271 bp, Xenorhabdus sp.
  unsure (1)..(1271): unsure at all n locations
nnnnnnnnnnnnnnnnnnnnnnnnnnnnnnnnnnncctaaaggaacagccctgcttgttgaaattacctcagggatatattatgcgtggctcgggatggcgacaagaagctcggttttagcatataagaaagtgcatgaggatgcataaacttgctcggttatgcnnnnnnnnnnnnnnnnnnnnnnnnnnnnnnnnnnnnnnnnnnnnnnnnnnnnnnnnnnnnnnnnnnnnnnnnnnnnnnnnnnnnnnnnnnnnnnnnnnnnnnnnnnnnnnnnnnnnnnnnnnnnnnnnnnnnnnnnnnnnnnnnnnnnnnnnnnnnnnnnnnnnnnnnnnnnnnnnnnnnnnnnnnnnnnnnnnnnnnnnnnnnnnnnnnnnnnnnnnnnnnnnnnnnnnnnnnnnnnnnnnnnnnnnnnnnnnnnnnnnnnnnnnnnnnnnnnnnnnnnnnnnnnnnnnnnnnnnnnnnnnnnnnnnnnnnnnnnnnnnnnnnnnnnnnnnnnnnnnnnnnnnnnnnnnnnnnnnnnnnnnnnnnnnnnnnnnnnnnnnnnnnnnnnnnnnnnnnnnnnnnnnnnnnnnnnnnnnnnnnnnnnnnnnnnnnnnnnnnnnnnnnnnnnnnnnnnnnnnnnnnnnnnnnnnnnnnnnnnnnnnnnnnnnnnnnnnnnnnnnnnnnnnnnnnnnnnnnnnnnnnnnnnnnnnnnnnnnnnnnnnnnnnnnnnnnnnnnnnnnnnnnnnnnnnnnnnnnnnnnnnnnnnnnnnnnnnnnnnnnnnnnnnnnnnnnnnnnnnnnnnnnnnnnnnnnnnnnnnnnnnnnnnnnnnnnnnnnnnnnnnnnnnnnnnnnnnnnnnnnnnnnnnnnnnnnnnnnnnnnnnnnnnnnnnnnnnnnnnnnnnnnnnnnnnnnnnnnnnnnnnnnnnnnnnnnnnnnnnnnnnnnnnnnnnnnnnnnnnnnnnnnnnnnnnnnnnnnnnnnnnnnnnnnnnnnnnnnnnnnnnnnnnnnnnnnnnnnnnnnnnnnnnnnnnnnnnnnnnnnnnnnnnnnnnnnnnnnnnnnnnnnnnnnnnnnnnnnnnnnnnnnnnnnnnnnnnnnnnnnnnnnnnnnnnnnnnnnnnnnnnnnnnnnnnnnnnnnnnnnnnnnnnnnnnnnnnnnnnnnnnnnnnnnnnnnnnnnnnnnnnnnnnnnnnnnnnnnnnnnnnnnnnnnnnnnnnnnnnnnnnnnnnnnnnnnnnnnnnnnnnnnnnnnnnnnnnnnnnnnnnnnnnnnnnnnnnnnnnnnnnnnnn

SEQ ID NO: 4296 - DNA, 910 bp, Xenorhabdus sp.
  unsure (1)..(910): unsure at all n locations
nnnnnnnnnnnnnnnnnnnnnnnnnnntctaaagatccgacgcccgatgtattattggctgggggtacacgcggtgccgaccccatcggcgcttccgaaatctagcgtctccgagcagactatgtcctctggcacattgcccgacgatgcattgaccgaacccactgtgcgcgtattacctcgccgtagcatacacaggcctctgagcggactgccattgctgcatgcgaacaagcaagacttgatgcactgtcccttgaccatgatcaagcgaagcgttatgagccggcggacaatccggctgagaccggcgctgagacagctcctgcagggacagtggatgcttaacagccgacgggaatcactatgctgtatgccccaaagcatggcccccttatactgccgtaacaagaccnnnnnnnnnnnnnnnnnnnnnnnnnnnnnnnnnnnnnnnnnnnnnnnnnnnnnnnnnnnnnnnnnnnnnnnnnnnnnnnnnnnnnnnnnnnnnnnnnnnnnnnnnnnnnnnnnnnnnnnnnnnnnnnnnnnnnnnnnnnnnnnnnnnnnnnnnnnnnnnnnnnnnnnnnnnnnnnnnnnnnnnnnnnnnnnnnnnnnnnnnnnnnnnnnnnnnnnnnnnnnnnnnnnnnnnnnnnnnnnnnnnnnnnnnnnnnnnnnnnnnnnnnnnnnnnnnnnnnnnnnnnnnnnnnnnnnnnnnnnnnnnnnnnnnnnnnnnnnnnnnnnnnnnnnnnnnnnnnnnnnnnnnnnnnnnnnnnnnnnnnnnnnnnnnnnnnnnnnnnnnnnnnnnnnnnnnnnnnnnnnnnnnnnnnnnnnnnnnnnnnnnnnnnnnnnnnnnnnnnnnnnnnnnnnnnnnnnnnnnnnnnnnnnnnnnnnnnnnnnnnnnnnnnnnnnnnnn

SEQ ID NO: 4297 - DNA, 938 bp, Xenorhabdus sp.
  unsure (1)..(938): unsure at all n locations
nnnnnnnnnnnnnnnnnnnnnnnnnnnnnaaagccccgcacatatagccagttccacaactggctgacgcgcatcttcacctgcttctgcggcacaccgacttccgccagtgcctcacccatctcctcgcgggtcatgccgatcagcgacggcttgccggacatgagatcgctattggcgatcagcggggttttgactgccaggccggcaggagcttgcattacggacatcacgctatcccatcatccaatgcagcgcacgaccggcctgtcgaaaaggcggaaaatcgtctgcatgtcgagaaaatcaaaggcggagcactcttcgcgcatccgcctgtcaatgttgccgcgcctttagcatcaaaccggcaaaaacgcaaatggccggtcaaggaccggccattcgtaaacgcgggaaagcgtcgggattatttgcagctctcgatctgcttgagggctgccgagatacccgacagggaataggagtaggaggttgcggtgccacggccggaagtcgcctttacggtcatcgacttaccgcctttcatggcagcgacgagagcgggctcttcagcagcattttcgacccaggcagccttgtccttggtgaacatgannnnnnnnnnnnnnnnnnnnnnnnnnnnnnnnnnnnnnnnnnnnnnnnnnnnnnnnnnnnnnnnnnnnnnnnnnnnnnnnnnnnnnnnnnnnnnnnnnnnnnnnnnnnnnnnnnnnnnnnnnnnnnnnnnnnnnnnnnnnnnnnnnnnnnnnnnnnnnnnnnnnnnnnnnnnnnnnnnnnnnnnnnnnnnnnnnnnnnnnnnnnnnnnnnnnnnnnnnnnnnnnnnnnnnnnnnnnnnnnnnnnnnnnnnnnnnnnnnnnnnnnnnnnnnnnnnnnnnnnnnnnnnnnnnnnnnnnnnnnnnnnnnnnnnnnnnnnnnnn

SEQ ID NO: 4298 - DNA, 909 bp, Xenorhabdus sp.
  unsure (1)..(909): unsure at all n locations
nnnnnnnnnnnnnnnnnnnnnnnnnnnnnnnntctgcagaggccgaaaggaccgctatccacgatcgtgccgagatggccctcggccgccccgatgcgccatgacctgcccatatggttctgcgcataaagtgcgatcaggccgcccgccagcaccatcaccatgccgccgatacggattgtcgcgccgggattgccgcggctcagaagccagaccgtcccctgcggctccagccacagggtaacgagaggcagaagagcgccgagcagaaaggcaaggcgaaagagcgtggcgggcagggtttgccagctcgcggccttttgcgaaaagccagatcggctctcccgtctttcttgccagccgcgtcgtcagaaacagaaatccggcaatataggcccacacggcaagcgcggtcgcggcatcaatcatggttcctcccgaagataatgacaggccggatcgtctcgacgaaggacagccctatccgattcgtccggcgcctgaagtataaacagcaataatgcgtgattgatacgctgcgtcttcgcgctttatgccggatggataaaactgcggaaagaaatgcaatacggtttgacgcttggatttgtctgtcgaacaagtttgagaatgtcaactttgtcattaaatattgnnnnnnnnnnnnnnnnnnnnnnnnnnnnnnnnnnnnnnnnnnnnnnnnnnnnnnnnnnnnnnnnnnnnnnnnnnnnnnnnnnnnnnnnnnnnnnnnnnnnnnnnnnnnnnnnnnnnnnnnnnnnnnnnnnnnnnnnnnnnnnnnnnnnnnnnnnnnnnnnnnnnnnnnnnnnnnnnnnnnnnnnnnnnnnnnnnnnnnnnnnnnnnnnnnnnnnnnnnnnnnnnnnnnnnnnnnnnnnnnnnnnnnnnnnnnnn

SEQ ID NO: 4299 - DNA, 801 bp, Xenorhabdus sp.
  unsure (1)..(801): unsure at all n locations
nnnnnnnnnnnnnnnnnnnnnnnnnnnnnnnnnnnnnncggcccttgttatgggatataaaccacaggaagcttgccgtttagatagggtaaaccggggcatatggaaatccttatcaccccctgtggagtttatgtaggagttaatatgattgaactgacgtnnnnnnnnnnnnnnnnnnnnnnnnnnnnnnnnnnnnnnnnnnnnnnnnnnnnnnnnnnnnnnnnnnnnnnnnnnnnnnnnnnnnnnnnnnnnnnnnnnnnnnnnnnnnnnnnnnnnnnnnnnnnnnnnnnnnnnnnnnnnnnnnnnnnnnnnnnnnnnnnnnnnnnnnnnnnnnnnnnnnnnnnnnnnnnnnnnnnnnnnnnnnnnnnnnnnnnnnnnnnnnnnnnnnnnnnnnnnnnnnnnnnnnnnnnnnnnnnnnnnnnnnnnnnnnnnnnnnnnnnnnnnnnnnnnnnnnnnnnnnnnnnnnnnnnnnnnnnnnnnnnnnnnnnnnnnnnnnnnnnnnnnnnnnnnnnnnnnnnnnnnnnnnnnnnnnnnnnnnnnnnnnnnnnnnnnnnnnnnnnnnnnnnnnnnnnnnnnnnnnnnnnnnnnnnnnnnnnnnnnnnnnnnnnnnnnnnnnnnnnnnnnnnnnnnnnnnnnnnnnnnnnnnnnnnnnnnnnnnnnnnnnnnnnnnnnnnnnnnnnnnnnnnnnnnnnnnnnnnnnnnnnnnnnnnnnnnnnnnnnnnnnnnnnnnnnnnnnnnnnnnnnnnnnnnnnnnnnnnnnnnnnnnnnnnnnnnnnnnnnnnnnnnnnnnnnnnnnnn

SEQ ID NO: 4300 - DNA, 940 bp, Xenorhabdus sp.
  unsure (1)..(940): unsure at all n locations
nnnnnnnnnnnnnnnnnnnnnnnnnnnnnnnnnnnnnnnnnnnnnnnacctcattggttcaatgatgattgtctggtaataccgcaaactgtcacgccagtggcatcccgactcactgatttggtcgatcgttttgagctgactgattttgaaagagatgttttgttgttaggtttacttcctcattttgatagtcgctactatcaactgtttgcattaattcaaggagaacaacaatctcgatttccctcttttacactggtattggaactcttttgtcactcaatgacggagaaacaggcacaacaggtcagttttctacatcgttcaccattgattggttgccagctattatccattgatagccgtaaaaaaatgtcgtcctggattcagactccttttatcacagataacagtgtgtatcattttttacttgggcatcactatattccgcctgatttagaatattattgtgagtggctaatgcccgcagagaatggctattacccagccaaattaaagcaattgcttaataacgtattgctatctgaccacgataatattcgtccgataatcttattaaaaggtattaccggcagtgcgagagcttatgcggttaccaatatcatggcgtcagnnnnnnnnnnnnnnnnnnnnnnnnnnnnnnnnnnnnnnnnnnnnnnnnnnnnnnnnnnnnnnnnnnnnnnnnnnnnnnnnnnnnnnnnnnnnnnnnnnnnnnnnnnnnnnnnnnnnnnnnnnnnnnnnnnnnnnnnnnnnnnnnnnnnnnnnnnnnnnnnnnnnnnnnnnnnnnnnnnnnnnnnnnnnnnnnnnnnnnnnnnnnnnnnnnnnnnnnnnnnnnnnnnnnnnnnnnnnnnnnnnnnnnnnnnnnnnnnnnnnnnnnnnnnnnnnnnnnnnnnnnnnnnnnnnnnnnnnnnnnnnn

SEQ ID NO: 4301 - DNA, 967 bp, Xenorhabdus sp.
  unsure (1)..(967): unsure at all n locations
nnnnnnnnnnnnnnnnnnnnnnnnnnnnnnnnnnnnnnnnnnnnntgctctaaagcactctggtctgttcgccatcttgcagcattgactggtaaatgcaatctctctgtctcctttttgggggagggcttcgttgcggagagccaggtgaacgtgtgttactgaatattgcggctcccggtgacatgcggttttgtgttttgggccctgttgcgcttcctcgctcactgactctctgagatgagatttttggctggggcgagccggttcagatgattggtgagcgcaggtgccggtatactctgcctcatgggattgcccttgatagagcatgtgcactatcggtcaacgcacggccacgaaccgtaacaaggccagtgttagcggcgttacccccatannnnnnnnnnnnnnnnnnnnnnnnnnnnnnnnnnnnnnnnnnnnnnnnnnnnnnnnnnnnnnnnnnnnnnnnnnnnnnnnnnnnnnnnnnnnnnnnnnnnnnnnnnnnnnnnnnnnnnnnnnnnnnnnnnnnnnnnnnnnnnnnnnnnnnnnnnnnnnnnnnnnnnnnnnnnnnnnnnnnnnnnnnnnnnnnnnnnnnnnnnnnnnnnnnnnnnnnnnnnnnnnnnnnnnnnnnnnnnnnnnnnnnnnnnnnnnnnnnnnnnnnnnnnnnnnnnnnnnnnnnnnnnnnnnnnnnnnnnnnnnnnnnnnnnnnnnnnnnnnnnnnnnnnnnnnnnnnnnnnnnnnnnnnnnnnnnnnnnnnnnnnnnnnnnnnnnnnnnnnnnnnnnnnnnnnnnnnnnnnnnnnnnnnnnnnnnnnnnnnnnnnnnnnnnnnnnnnnnnnnnnnnnnnnnnnnnnnnnnnnnnnnnnnnnnnnnnnnnnnnnnnnnnnnnnnnnnnnnnnnnnnnnnnnnnnnnnnnnnnnnnnnnnnnnnnnnnnnnnnnnnnnnnnnnnnnnnnnnnnnnnnnnn

SEQ ID NO: 4302 - DNA, 929 bp, Xenorhabdus sp.
  unsure (1)..(929): unsure at all n locations
nnnnnnnnnnnnnnnnnnnnnnnnnngtgctctaaagataatccaggagcccgcctcccattttattgcatccgcacggacagaccattctattctacatggatcaagccccaaggaaagcaacatactgacgcaagatccgggatagcaatatggacttgctactgtcgtaccggttgccccttctatcaaaagggggatatatctgatcttagctatctataatcgacggtccccgagttataaatacgccgccaggacacccttggccaacacaatgccgtataatgtgggtgatatgtcagagcaatgtcgacctttgcacgacctgagacgcacaaccctctttgtacctacagtaaagattgcccaattgtccgaattaaccggcttttaatataaaccccctttgcacattccagtttaacggcaccgctttcgggtgctttgaactgannnnnnnnnnnnnnnnnnnnnnnnnnnnnnnnnnnnnnnnnnnnnnnnnnnnnnnnnnnnnnnnnnnnnnnnnnnnnnnnnnnnnnnnnnnnnnnnnnnnnnnnnnnnnnnnnnnnnnnnnnnnnnnnnnnnnnnnnnnnnnnnnnnnnnnnnnnnnnnnnnnnnnnnnnnnnnnnnnnnnnnnnnnnnnnnnnnnnnnnnnnnnnnnnnnnnnnnnnnnnnnnnnnnnnnnnnnnnnnnnnnnnnnnnnnnnnnnnnnnnnnnnnnnnnnnnnnnnnnnnnnnnnnnnnnnnnnnnnnnnnnnnnnnnnnnnnnnnnnnnnnnnnnnnnnnnnnnnnnnnnnnnnnnnnnnnnnnnnnnnnnnnnnnnnnnnnnnnnnnnnnnnnnnnnnnnnnnnnnnnnnnnnnnnnnnnnnnnnnnnnnnnnnnnnnnnnnnnnnnnnnnnnnnnnnnnnnnnnnnnnnnnnnnnnnnn

SEQ ID NO: 4303 - DNA, 802 bp, Xenorhabdus sp.
  unsure (1)..(802): unsure at all n locations
nnnnnnnnnnnnnnnnnnnnnnnnnnnnnnnnnnnnnntgcatagttttcactaaatctaatgacctgaatatccacatggctctgcccatcaagccgatgctctcctagctgattggcgaatagcaataatgacagccagaaattactggcaacaccatgaacaattggactcatactgtgtttcacccataatcacttgccgtctatagtttccacgaaatgacaaattggtattaacacaaacacatttgtgtcgcgctatactccgtcgctgtatagtgcccataacacacactccatctctattcgacggtactgaatatatagcttacgaacatcatatattcgttaacaggannnnnnnnnnnnnnnnnnnnnnnnnnnnnnnnnnnnnnnnnnnnnnnnnnnnnnnnnnnnnnnnnnnnnnnnnnnnnnnnnnnnnnnnnnnnnnnnnnnnnnnnnnnnnnnnnnnnnnnnnnnnnnnnnnnnnnnnnnnnnnnnnnnnnnnnnnnnnnnnnnnnnnnnnnnnnnnnnnnnnnnnnnnnnnnnnnnnnnnnnnnnnnnnnnnnnnnnnnnnnnnnnnnnnnnnnnnnnnnnnnnnnnnnnnnnnnnnnnnnnnnnnnnnnnnnnnnnnnnnnnnnnnnnnnnnnnnnnnnnnnnnnnnnnnnnnnnnnnnnnnnnnnnnnnnnnnnnnnnnnnnnnnnnnnnnnnnnnnnnnnnnnnnnnnnnnnnnnnnnnnnnnnnnnnnnnnnnnnnnnnnnnnnnnnnnnnnnnnnnnnnnnnnnnnnnnnnnnnnnnnn

SEQ ID NO: 4304 - DNA, 680 bp, Xenorhabdus sp.
  unsure (1)..(680): unsure at all n locations
nnnnnnnnnnnnnnnnnnnnnnnnnnnnnnnnnnnnnccgatggttgcaatccagggctggggggctatttgaggaatgatggtccatcggacccgaaatgtgtctgacatgtcgtcttgggcttccatttggaagtccaccaagatggtgcaggagaaatccctgacgggaacggtgtggcgatgttctgggtgactgaagagctggagcagcggcgctgcacagggcacattttgacgatgccaaaccggtctcttgccaccacccgatgaacatgatcatacgccgacagcatgatgccgtcaggcgatacgggtgaaactggattgagaccggtatttacttaggcaaagtctacctcgatatgccaacgctcttcgaggacatcagtaacaaatgatcgcttcgagagggagcctttcgatatatccccaaacagaaacagaagctggtgcggcttttatgcaacttggtcctgtcggccagaagctccaattctggccagagtttggacaaggcaggaatattgaaagaaggaccgggcgtttgccagagaggcgaaaacctactttnnnnnnnnnnnnnnnnnnnnnnnnnnnnnnnnnnnnnnnnnnnnnnnnnnnnnnnnnnnnnnnnnnnnnnnnnnnnnnnnnnnnnnnnnnnnnnnnnnnnnnnnnnn

SEQ ID NO: 4305 - DNA, 939 bp, Xenorhabdus sp.
  unsure (1)..(939): unsure at all n locations
nnnnnnnnnnnnnnnnnnnnnnnnnnnnnnnnnnnnnnnnnnnnnnnnnnnnnnnnnnnnnnnnnngggcgagcatcactagccaccgcgatgacccgcaccagcgctttgccgctgtgcatgaacccgtggctacaccgaacaggaggtgcatatgaacggatacaactctttcaattaaaacggatgggattgctcacttatacgtcatatcgacaccgagcgtgatattacccttcactttattctgtcagtaacgcgtcttgatccactttatcagtcctgatgatccctttgggacacattcaatatacaactttattcacggatctgaccggctaataccgccgactctgactcagcatctttacctgggaatctgnnnnnnnnnnnnnnnnnnnnnnnnnnnnnnnnnnnnnnnnnnnnnnnnnnnnnnnnnnnnnnnnnnnnnnnnnnnnnnnnnnnnnnnnnnnnnnnnnnnnnnnnnnnnnnnnnnnnnnnnnnnnnnnnnnnnnnnnnnnnnnnnnnnnnnnnnnnnnnnnnnnnnnnnnnnnnnnnnnnnnnnnnnnnnnnnnnnnnnnnnnnnnnnnnnnnnnnnnnnnnnnnnnnnnnnnnnnnnnnnnnnnnnnnnnnnnnnnnnnnnnnnnnnnnnnnnnnnnnnnnnnnnnnnnnnnnnnnnnnnnnnnnnnnnnnnnnnnnnnnnnnnnnnnnnnnnnnnnnnnnnnnnnnnnnnnnnnnnnnnnnnnnnnnnnnnnnnnnnnnnnnnnnnnnnnnnnnnnnnnnnnnnnnnnnnnnnnnnnnnnnnnnnnnnnnnnnnnnnnnnnnnnnnnnnnnnnnnnnnnnnnnnnnnnnnnnnnnnnnnnnnnnnnnnnnnnnnnnnnnnnnnnnnnnnnnnnnnnnnnnnnnnnnnnnnnnnnnnnnnnnnnnnnnnnnnnnnnn

SEQ ID NO: 4306 - DNA, 922 bp, Xenorhabdus sp.
  unsure (1)..(922): unsure at all n locations
nnnnnnnnnnnnnnnnnnnnnnnnnnnnnnnnnnnnnnnnnnnnnnnnnnnnnnnnnnnnnncatgggcactgaaagccaattctactgtcttgcgcctcacggcaagacacacatcttcagcgtgctgtggctgctgatcaggatcacacatgatcgggttgcggtcacggactaggctcatctgtggttctatctgagcttgcagagcccggaactcagcaatattcccgaataactctgtaatattggtgcgcgtgcctacgcaatccagccataaagaatggtgctcatcatgctgaactcgaccccacaacaaagtgggaattgctgcgtcctgacggttgaaacaccaaagaacggcgctttaccgtgcaggattgagcatacacagaacggcgatggcgatatggccatgaatacctttatcataccctacattctaacggctagcgaccaaatcacgcacnnnnnnnnnnnnnnnnnnnnnnnnnnnnnnnnnnnnnnnnnnnnnnnnnnnnnnnnnnnnnnnnnnnnnnnnnnnnnnnnnnnnnnnnnnnnnnnnnnnnnnnnnnnnnnnnnnnnnnnnnnnnnnnnnnnnnnnnnnnnnnnnnnnnnnnnnnnnnnnnnnnnnnnnnnnnnnnnnnnnnnnnnnnnnnnnnnnnnnnnnnnnnnnnnnnnnnnnnnnnnnnnnnnnnnnnnnnnnnnnnnnnnnnnnnnnnnnnnnnnnnnnnnnnnnnnnnnnnnnnnnnnnnnnnnnnnnnnnnnnnnnnnnnnnnnnnnnnnnnnnnnnnnnnnnnnnnnnnnnnnnnnnnnnnnnnnnnnnnnnnnnnnnnnnnnnnnnnnnnnnnnnnnnnnnnnnnnnnnnnnnnnnnnnnnnnnnnnnnnnnnnnnnnnnnnnnnnnnnnnnnnnnnnnnnnnnn

SEQ ID NO: 4307 - DNA, 1002 bp, Xenorhabdus sp.
  unsure (1)..(1002): unsure at all n locations
nnnnnnnnnnnnnnnnnnnnnnnnnnnnnnnnnnnnnnnnnnnnnnnnncccggcgcatcccttatttacgtgtggagaatgtaaacagtgatcaattaaaaatacgccattacaatacctgnnnnnnnnnnnnnnnnnnnnnnnnnnnnnnnnnnnnnnnnnnnnnnnnnnnnnnnnnnnnnnnnnnnnnnnnnnnnnnnnnnnnnnnnnnnnnnnnnnnnnnnnnnnnnnnnnnnnnnnnnnnnnnnnnnnnnnnnnnnnnnnnnnnnnnnnnnnnnnnnnnnnnnnnnnnnnnnnnnnnnnnnnnnnnnnnnnnnnnnnnnnnnnnnnnnnnnnnnnnnnnnnnnnnnnnnnnnnnnnnnnnnnnnnnnnnnnnnnnnnnnnnnnnnnnnnnnnnnnnnnnnnnnnnnnnnnnnnnnnnnnnnnnnnnnnnnnnnnnnnnnnnnnnnnnnnnnnnnnnnnnnnnnnnnnnnnnnnnnnnnnnnnnnnnnnnnnnnnnnnnnnnnnnnnnnnnnnnnnnnnnnnnnnnnnnnnnnnnnnnnnnnnnnnnnnnnnnnnnnnnnnnnnnnnnnnnnnnnnnnnnnnnnnnnnnnnnnnnnnnnnnnnnnnnnnnnnnnnnnnnnnnnnnnnnnnnnnnnnnnnnnnnnnnnnnnnnnnnnnnnnnnnnnnnnnnnnnnnnnnnnnnnnnnnnnnnnnnnnnnnnnnnnnnnnnnnnnnnnnnnnnnnnnnnnnnnnnnnnnnnnnnnnnnnnnnnnnnnnnnnnnnnnnnnnnnnnnnnnnnnnnnnnnnnnnnnnnnnnnnnnnnnnnnnnnnnnnnnnnnnnnnnnnnnnnnnnnnnnnnnnnnnnnnnnnnnnnnnnnnnnnnnnnnnnnnnnnnnnnnnnnnnnnnnnnnnnnnnnnnnnnnnnnnnnnnnnnnnnnnnnnnnnnnnnnnnnnnnnnnnnnnnnnnnnnnnnnnnnnnnnnnnnnnnnnnnnnnnnnnnnnnnnnnnnnnnnnnnnnn

SEQ ID NO: 4308 - DNA, 695 bp, Xenorhabdus sp.
  unsure (1)..(695): unsure at all n locations
nnnnnnnnnnnnnnnnnnnnnnnnnnnncccagccattggctcgagcatggccatagctgcctcctgtggaggcctgtagcgggaccaaacaggtttgtccctgacccataaggaactgtctgtgggggcgccgagagctgacgaggatatgtccatatcgagacccacctaaaggcatgagacactggccctgaggaatgctgccttaccactgatataagggaagtttaagtcttacacattgacctgggaaccttactgcctattgtgcagcacctgggcttccaggggtagctcacccataaacgctggtgaaaatactagatgctgaagaccaggaggactctccattgggatacatcgaactggatccaagccgctgtgacatccctgatagatgacggcccccaaaaaaacttgcacagatgaacacttttannnnnnnnnnnnnnnnnnnnnnnnnnnnnnnnnnnnnnnnnnnnnnnnnnnnnnnnnnnnnnnnnnnnnnnnnnnnnnnnnnnnnnnnnnnnnnnnnnnnnnnnnnnnnnnnnnnnnnnnnnnnnnnnnnnnnnnnnnnnnnnnnnnnnnnnnnnnnnnnnnnnnnnnnnnnnnnnnnnnnnnnnnnnnnnnnnnnnnnnnnnnnnnnnnnnnnnnnnnnnnnnnnnnnnnnnnnnnnnnnnnnnnnnnnnnnnnn

SEQ ID NO: 4309 - DNA, 892 bp, Xenorhabdus sp.
  unsure (1)..(892): unsure at all n locations
nnnnnnnnnnnnnnnnnnnnnnnnnnnntgtgctctaaagaccgatggagatgcggggaatatcgaagccactccttaaggacaacagaagacggcgcacattcaggagccattgatatggcattacgaggtatcatcaaagctgtgtcccgcgacactgatggttcaccgcctattacgtgtcctggacatgcnnnnnnnnnnnnnnnnnnnnnnnnnnnnnnnnnnnnnnnnnnnnnnnnnnnnnnnnnnnnnnnnnnnnnnnnnnnnnnnnnnnnnnnnnnnnnnnnnnnnnnnnnnnnnnnnnnnnnnnnnnnnnnnnnnnnnnnnnnnnnnnnnnnnnnnnnnnnnnnnnnnnnnnnnnnnnnnnnnnnnnnnnnnnnnnnnnnnnnnnnnnnnnnnnnnnnnnnnnnnnnnnnnnnnnnnnnnnnnnnnnnnnnnnnnnnnnnnnnnnnnnnnnnnnnnnnnnnnnnnnnnnnnnnnnnnnnnnnnnnnnnnnnnnnnnnnnnnnnnnnnnnnnnnnnnnnnnnnnnnnnnnnnnnnnnnnnnnnnnnnnnnnnnnnnnnnnnnnnnnnnnnnnnnnnnnnnnnnnnnnnnnnnnnnnnnnnnnnnnnnnnnnnnnnnnnnnnnnnnnnnnnnnnnnnnnnnnnnnnnnnnnnnnnnnnnnnnnnnnnnnnnnnnnnnnnnnnnnnnnnnnnnnnnnnnnnnnnnnnnnnnnnnnnnnnnnnnnnnnnnnnnnnnnnnnnnnnnnnnnnnnnnnnnnnnnnnnnnnnnnnnnnnnnnnnnnnnnnnnnnnnnnnnnnnnnnnnnnnnnnnnnnnnnnnnnnnnnnnnnnnnnnnnnnnnnnnnnnnnnnnnnnnnnnnnnnnnnnnnnnnnnnnnnnnnnnnnnnn

SEQ ID NO: 4310 - DNA, 930 bp, Xenorhabdus sp.
  unsure (1)..(930): unsure at all n locations
nnnnnnnnnnnnnnnnnnnnnnnnnnnnnnnnnnnnnnnnnnnnnnnnnnnnnnnnnnnnnnnnnnnnnnnnnnnnnnnnnaagaannaagcgtgatctaaannctgggaaannagttaagcagtattctttgtccgnnatcctcagcaggggttttcggtatttgatagcgacatcgttgagctagacgggcttgtcatgatggtattcctggatctgaatagatacanntgacctgaaacacgttgcaggtanngcggtttttggagatcnagcctagtgcttcccttgaacaatcactagnnagcggctggtaactgttactcatataatctaagcgtaaaagtacctgttctggtctccaaagaccaaggtgtgctttatgataaattctgacagggatangnggcgtaatgctactgaacacgtngctgtcaatcgcctagataaattttcctcggtatgggctggatattacggggggatgaaaccaaaatttacctttgtggctttgcatgaacatctcaggctcattccccgaacttttcaatttgtattggttnnnnnnnnnnnnnnnnnnnnnnnnnnnnnnnnnnnnnnnnnnnnnnnnnnnnnnnnnnnnnnnnnnnnnnnnnnnnnnnnnnnnnnnnnnnnnnnnnnnnnnnnnnnnnnnnnnnnnnnnnnnnnnnnnnnnnnnnnnnnnnnnnnnnnnnnnnnnnnnnnnnnnnnnnnnnnnnnnnnnnnnnnnnnnnnnnnnnnnnnnnnnnnnnnnnnnnnnnnnnnnnnnnnnnnnnnnnnnnnnnnnnnnnnnnnnnnnnnnnnnnnnnnnnnnnnnnnnnnnnnnnnnnnnnnnnnnnnnnnnnnnnnnnnnnnnnnnnnnnnnnnnnnnnnnnnnnnnnnnnnnnnnnnnnnnnnnnnnnnnnnnnnnnn

SEQ ID NO: 4311 - DNA, 895 bp, Xenorhabdus sp.
  unsure (1)..(895): unsure at all n locations
nnnnnnnnnnnnnnnnnnnnnnnnnnnnnnnnnnnnnnnnnnnnnnnnnnnnnnnnttccggccagaagtgaccattgagcaggtggcgcgcccgtttttacttgggcgcgttcaaaaagcgcgaggtggaggttattaatgagcctacgcaattgcccatcaggagcgatccgctacaaggtctggcgcgcctccataatatgtttgagcaatgtttgaagtgtggtaatgctattatcgcaataatctaaaaccctgcattatagcagattgagtatcggtagatacgtactataagagaggtagtaattttttgtggaggaatctataacgatgagacttctattgcaacttnnnnnnnnnnnnnnnnnnnnnnnnnnnnnnnnnnnnnnnnnnnnnnnnnnnnnnnnnnnnnnnnnnnnnnnnnnnnnnnnnnnnnnnnnnnnnnnnnnnnnnnnnnnnnnnnnnnnnnnnnnnnnnnnnnnnnnnnnnnnnnnnnnnnnnnnnnnnnnnnnnnnnnnnnnnnnnnnnnnnnnnnnnnnnnnnnnnnnnnnnnnnnnnnnnnnnnnnnnnnnnnnnnnnnnnnnnnnnnnnnnnnnnnnnnnnnnnnnnnnnnnnnnnnnnnnnnnnnnnnnnnnnnnnnnnnnnnnnnnnnnnnnnnnnnnnnnnnnnnnnnnnnnnnnnnnnnnnnnnnnnnnnnnnnnnnnnnnnnnnnnnnnnnnnnnnnnnnnnnnnnnnnnnnnnnnnnnnnnnnnnnnnnnnnnnnnnnnnnnnnnnnnnnnnnnnnnnnnnnnnnnnnnnnnnnnnnnnnnnnnnnnnnnnnnnnnnnnnnnnnnnnnnnnnnnnnnnnnnnnnnnnnnnnnnnnnnnnnnnnnnnnnnnnnnnnnnnnnnnn

SEQ ID NO: 4312 - DNA, 578 bp, Xenorhabdus sp.
  unsure (1)..(578): unsure at all n locations
nnnnnnnnnnnnnnnnnnnnngcggactttaaggtttttctttaggttttgaagcctctattgtctggctgtgnagtttctcggtataccctcttaatccaattaccccgattacccctannnnnnnnnnnnnnnnnnnnnnnnnnnnnnnnnnnnnnnnnnnnnnnnnnnnnnnnnnnnnnnnnnnnnnnnnnnnnnnnnnnnnnnnnnnnnnnnnnnnnnnnnnnnnnnnnnnnnnnnnnnnnnnnnnnnnnnnnnnnnnnnnnnnnnnnnnnnnnnnnnnnnnnnnnnnnnnnnnnnnnnnnnnnnnnnnnnnnnnnnnnnnnnnnnnnnnnnnnnnnnnnnnnnnnnnnnnnnnnnnnnnnnnnnnnnnnnnnnnnnnnnnnnnnnnnnnnnnnnnnnnnnnnnnnnnnnnnnnnnnnnnnnnnnnnnnnnnnnnnnnnnnnnnnnnnnnnnnnnnnnnnnnnnnnnnnnnnnnnnnnnnnnnnnnnnnnnnnnnnnnnnnnnnnnnnnnnnnnnnnnnnnnnnnnnnnnnnnnnnnnnnnnnnnnnnnnnnnnnnnnnnnnnnnnnnnnnnnn

SEQ ID NO: 4313 - DNA, 898 bp, Xenorhabdus sp.
  unsure (1)..(898): unsure at all n locations
nnnnnnnnnnnnnnnnnnnagctgaccgtctaatccggccatacattcctgaactaaatgattacgctgccctgctacatggcttactacgtgctgttcatcttgacaatttcggtgttgttgctgccataactgccaacgattatggcgcgacctaggtacacgctgttgttctatataattttgctgccattcttaatatctatatttcaggcgccatcgtagcacatgacaaggttgtgggtatcactttgactatatgtggccctaccgccaccttttgcggatctgcacccggcaccaaaaattacattgttatcattggggatgttgctgctacagcaggaaacacggactatggttctctccatgaaataaatgttgacattgactctatctatcccacctatgctgtacctttcgtggagggacctcatgtcggtagcactgccactgaccttgatcatgggggaagtctttataccgctccccacgattctgatgcctttaannnnnnnnnnnnnnnnnnnnnnnnnnnnnnnnnnnnnnnnnnnnnnnnnnnnnnnnnnnnnnnnnnnnnnnnnnnnnnnnnnnnnnnnnnnnnnnnnnnnnnnnnnnnnnnnnnnnnnnnnnnnnnnnnnnnnnnnnnnnnnnnnnnnnnnnnnnnnnnnnnnnnnnnnnnnnnnnnnnnnnnnnnnnnnnnnnnnnnnnnnnnnnnnnnnnnnnnnnnnnnnnnnnnnnnnnnnnnnnnnnnnnnnnnnnnnnnnnnnnnnnnnnnnnnnnnnnnnnnnnnnnnnnnnnnnnnnnnnnnnnnnnnnnnnnnnnnnnnnnnnnnnnnnnnnnnnnnnnnnnnnnnnnnnnnnnnnnnnnnnnnnnnnnnnnnnnnnnnnnnnnnnnn

SEQ ID NO: 4314 - DNA, 958 bp, Xenorhabdus sp.
  unsure (1)..(958): unsure at all n locations
nnnnnnnnnnnnnnnnnnnnnnnnnnnnnnnnnnnnnnnnnaggcctcatcgtatcgcagcgtcttcgtgcccggcacattcatgtgttcgatggaatattcaaccggttccgccggcaggaaagagacgggcagatggccgggcagggcggcggcgagacgggcgacgatgccttcggcaatcagcgtatcggtctcgaaaggcaggtgcggcccgtgctgttcatgcgcgccgagcggcagcacggaaattgcacctgttgcgcgaagatgcgggtctgttacgttttcgtcgtgataatgcgtgtatgagtttggcatctggcagtccgcgcgtgcattcgttaaggatttccagcaacatatatcggttccgccacagggtaaaaggcactcgcatatgagcaaggacaaatccgggcataaggacaaaagcgccaagaaagaaaaaggcggcaaaaaatcaaaggacgccaaaaaaagggatgagaatttcaaccccgaggaactggcgcaatccatcacccaagccgcccgttccatgcgcacggcgctgaatcacaacctggtcgaaagcgggctttatgcgggccaagacggtgttatnnnnnnnnnnnnnnnnnnnnnnnnnnnnnnnnnnnnnnnnnnnnnnnnnnnnnnnnnnnnnnnnnnnnnnnnnnnnnnnnnnnnnnnnnnnnnnnnnnnnnnnnnnnnnnnnnnnnnnnnnnnnnnnnnnnnnnnnnnnnnnnnnnnnnnnnnnnnnnnnnnnnnnnnnnnnnnnnnnnnnnnnnnnnnnnnnnnnnnnnnnnnnnnnnnnnnnnnnnnnnnnnnnnnnnnnnnnnnnnnnnnnnnnnnnnnnnnnnnnnnnnnnnnnnnnnnnnnnnnnnnnnnnnnnnnnnnnnnnnnnnnnnnnnnnnnnnnnnnnnnnnnnnnnnnnnnnnnnnnnnnnnnnnnnnnn

SEQ ID NO: 4315 - DNA, 715 bp, Xenorhabdus sp.
  unsure (1)..(715): unsure at all n locations
nnnnnnnnnnnnnnnnnnnnnnnnnnnnnnnnnnnnnnnnnnnnncgtagtttcatgatttcctcccagttgatccgtggctcccatccaccgatccaggctgccagattgttgagtgccgtggccaaagtaaaatgaaataaggggggtaataaataacctgacggttatcaataccctgccattccgatctgccccataccggatcggacattaagcgccgcccggcgattctcaaaccggcgaccgtcggcgatggcgtgaggtgaagacagcttcgggcaaacccggtgcggaatagtgcttgcagggaggcgaaaacccggaactttaaccagttcgaaggggattgttcgtagtctctcgaagcatatttttgaactttacttggtgtcttgatgggtgaatatcagaacaaagctgttgagctgatgcgaaatcgcattggagaaaatatgctcaacaacaggatcgagcgtcgtgaggcattcctgcgcaaggcgctcacgctctatcatgccatgggcggaacggcggaagatattcaggcggcgttgaaagatgccgcatccacaccggctccagccatcgatctggccgtcggcgacgtcatgnnnnnnnnnnnnnnnnnnnnnnnnnnnnnnnnnnnnnnnnnnnnnnnnnnnnnnnnnnnnnnnnnnnnnnnnnnnnnnnnnnnnnnnnnnnnnnnnnnnnn

SEQ ID NO: 4316 - DNA, 915 bp, Xenorhabdus sp.
  unsure (1)..(915): unsure at all n locations
nnnnnnnnnnnnnnnnnnnnnnnnnnnnnnnnnnnnnnnnnnnnnnnnnnnnnnnntatagtagttcgcgttattcccgtgccctctttccttggctttgttttctgattcctgttttcttgcagatgaggcggccaccggcaggccagtatgcaatgcatccggggatgtccacaccacggtcactccagtcaacagcggcccctccataccgttcgacaccgagcggatagtgaccggacattcagnnnnnnnnnnnnnnnnnnnnnnnnnnnnnnnnnnnnnnnnnnnnnnnnnnnnnnnnnnnnnnnnnnnnnnnnnnnnnnnnnnnnnnnnnnnnnnnnnnnnnnnnnnnnnnnnnnnnnnnnnnnnnnnnnnnnnnnnnnnnnnnnnnnnnnnnnnnnnnnnnnnnnnnnnnnnnnnnnnnnnnnnnnnnnnnnnnnnnnnnnnnnnnnnnnnnnnnnnnnnnnnnnnnnnnnnnnnnnnnnnnnnnnnnnnnnnnnnnnnnnnnnnnnnnnnnnnnnnnnnnnnnnnnnnnnnnnnnnnnnnnnnnnnnnnnnnnnnnnnnnnnnnnnnnnnnnnnnnnnnnnnnnnnnnnnnnnnnnnnnnnnnnnnnnnnnnnnnnnnnnnnnnnnnnnnnnnnnnnnnnnnnnnnnnnnnnnnnnnnnnnnnnnnnnnnnnnnnnnnnnnnnnnnnnnnnnnnnnnnnnnnnnnnnnnnnnnnnnnnnnnnnnnnnnnnnnnnnnnnnnnnnnnnnnnnnnnnnnnnnnnnnnnnnnnnnnnnnnnnnnnnnnnnnnnnnnnnnnnnnnnnnnnnnnnnnnnnnnnnnnnnnnnnnnnnnnnnnnnnnnnnnnnnnnnnnnnnnnnnnnnnnnnnnnnnnnnnnnnnnnnnnnnnnnnnnnnnnnnnnnnnnnnn

SEQ ID NO: 4317 - DNA, 953 bp, Xenorhabdus sp.
  unsure (1)..(953): unsure at all n locations
nnnnnnnnnnnnnnnnnnnnnnnnnnnnnnnnnnnnnnnnnnnnnnnnnnnnnnnntggaaatgtggngcgcgtgttancattcattcgggaatttttattcggagggggtcgcngggggangggggggggttttttaaaaaaannnnnnnnnnnnnnnnnnnnnnnnnnnnnnnnnnnnnnnnnnnnnnnnnnnnnnnnnnnnnnnnnnnnnnnnnnnnnnnnnnnnnnnnnnnnnnnnnnnnnnnnnnnnnnnnnnnnnnnnnnnnnnnnnnnnnnnnnnnnnnnnnnnnnnnnnnnnnnnnnnnnnnnnnnnnnnnnnnnnnnnnnnnnnnnnnnnnnnnnnnnnnnnnnnnnnnnnnnnnnnnnnnnnnnnnnnnnnnnnnnnnnnnnnnnnnnnnnnnnnnnnnnnnnnnnnnnnnnnnnnnnnnnnnnnnnnnnnnnnnnnnnnnnnnnnnnnnnnnnnnnnnnnnnnnnnnnnnnnnnnnnnnnnnnnnnnnnnnnnnnnnnnnnnnnnnnnnnnnnnnnnnnnnnnnnnnnnnnnnnnnnnnnnnnnnnnnnnnnnnnnnnnnnnnnnnnnnnnnnnnnnnnnnnnnnnnnnnnnnnnnnnnnnnnnnnnnnnnnnnnnnnnnnnnnnnnnnnnnnnnnnnnnnnnnnnnnnnnnnnnnnnnnnnnnnnnnnnnnnnnnnnnnnnnnnnnnnnnnnnnnnnnnnnnnnnnnnnnnnnnnnnnnnnnnnnnnnnnnnnnnnnnnnnnnnnnnnnnnnnnnnnnnnnnnnnnnnnnnnnnnnnnnnnnnnnnnnnnnnnnnnnnnnnnnnnnnnnnnnnnnnnnnnnnnnnnnnnnnnnnnnnnnnnnnnnnnnnnnnnnnnnnnnnnnnnnnnnnnnnnnnnnnnnnnnnnnnnnnnnnnnnnnnnnnnnnnnnnnnnnnnnnnnnnnnnnnnnnnnnnnnnnnnn

SEQ ID NO: 4318 - DNA, 805 bp, Xenorhabdus sp.
  unsure (1)..(805): unsure at all n locations
nnnnnnnnnnnnnnnnnnnnnnnnnnnnnnnnnnnnnnnnnnnnnnnnnnnnnnnnnnnnnnnnnnnnnnnnnnnngtttaagcccttgttaacctggagtaatcggagcttgccgaaacaagggttcaataaagggctttaacaataatcgaatacctgcgcccattttaatatatgttttggggggagggtaaatattaattactttaccaaaactataattacttttttttcctgtgtaagaaattaaacaacatgcaatatattgtggtttttttgagaaaannnnnnnnnnnnnnnnnnnnnnnnnnnnnnnnnnnnnnnnnnnnnnnnnnnnnnnnnnnnnnnnnnnnnnnnnnnnnnnnnnnnnnnnnnnnnnnnnnnnnnnnnnnnnnnnnnnnnnnnnnnnnnnnnnnnnnnnnnnnnnnnnnnnnnnnnnnnnnnnnnnnnnnnnnnnnnnnnnnnnnnnnnnnnnnnnnnnnnnnnnnnnnnnnnnnnnnnnnnnnnnnnnnnnnnnnnnnnnnnnnnnnnnnnnnnnnnnnnnnnnnnnnnnnnnnnnnnnnnnnnnnnnnnnnnnnnnnnnnnnnnnnnnnnnnnnnnnnnnnnnnnnnnnnnnnnnnnnnnnnnnnnnnnnnnnnnnnnnnnnnnnnnnnnnnnnnnnnnnnnnnnnnnnnnnnnnnnnnnnnnnnnnnnnnnnnnnnnnnnnnnnnnnnnnnnnnnnnnnnnnnnnnnnnnnnnnnnnnnnnnnnnnnnnnnnnnnnnnnnnnnnnnnnnnnnnnnnnnnnnnnnnnnnnnnnnnnnnnn

SEQ ID NO: 4319 - DNA, 726 bp, Xenorhabdus sp.
  unsure (1)..(726): unsure at all n locations
nnnnnnnnnnnnnnnnnnnnnnnnnnnnnnnnnnnnnnnnnnnnnnnnnnnnnnnnntcgatttcagcattcactatttatagtggtagataaatattagtgatatgatacataaaggaatgttttaatatgaggctttttttaaagacaatgtgtccacccgaagaatgatctgagattatgatnnnnnnnnnnnnnnnnnnnnnnnnnnnnnnnnnnnnnnnnnnnnnnnnnnnnnnnnnnnnnnnnnnnnnnnnnnnnnnnnnnnnnnnnnnnnnnnnnnnnnnnnnnnnnnnnnnnnnnnnnnnnnnnnnnnnnnnnnnnnnnnnnnnnnnnnnnnnnnnnnnnnnnnnnnnnnnnnnnnnnnnnnnnnnnnnnnnnnnnnnnnnnnnnnnnnnnnnnnnnnnnnnnnnnnnnnnnnnnnnnnnnnnnnnnnnnnnnnnnnnnnnnnnnnnnnnnnnnnnnnnnnnnnnnnnnnnnnnnnnnnnnnnnnnnnnnnnnnnnnnnnnnnnnnnnnnnnnnnnnnnnnnnnnnnnnnnnnnnnnnnnnnnnnnnnnnnnnnnnnnnnnnnnnnnnnnnnnnnnnnnnnnnnnnnnnnnnnnnnnnnnnnnnnnnnnnnnnnnnnnnnnnnnnnnnnnnnnnnnnnnnnnnnnnnnnnnnnnnnnnnnnnnnnnnnnnnnnnnnnnnnnnnnnnnnnnnnnnnnnnnnnnnnnnnnnnnnnnnnnn

SEQ ID NO: 4320 - DNA, 806 bp, Xenorhabdus sp.
  unsure (1)..(806): unsure at all n locations
nnnnnnnnnnnnnnnnnnnnnnnnnnnnnnnnnnnnnnnnnnnnccctgtcgaggtcttattgtcacttaaatcgtaggtgctttatacataaggatatgtattaatgtgggtggttttttaacaacaatatgttcttttggtggtcgaggtgggttnnnnnnnnnnnnnnnnnnnnnnnnnnnnnnnnnnnnnnnnnnnnnnnnnnnnnnnnnnnnnnnnnnnnnnnnnnnnnnnnnnnnnnnnnnnnnnnnnnnnnnnnnnnnnnnnnnnnnnnnnnnnnnnnnnnnnnnnnnnnnnnnnnnnnnnnnnnnnnnnnnnnnnnnnnnnnnnnnnnnnnnnnnnnnnnnnnnnnnnnnnnnnnnnnnnnnnnnnnnnnnnnnnnnnnnnnnnnnnnnnnnnnnnnnnnnnnnnnnnnnnnnnnnnnnnnnnnnnnnnnnnnnnnnnnnnnnnnnnnnnnnnnnnnnnnnnnnnnnnnnnnnnnnnnnnnnnnnnnnnnnnnnnnnnnnnnnnnnnnnnnnnnnnnnnnnnnnnnnnnnnnnnnnnnnnnnnnnnnnnnnnnnnnnnnnnnnnnnnnnnnnnnnnnnnnnnnnnnnnnnnnnnnnnnnnnnnnnnnnnnnnnnnnnnnnnnnnnnnnnnnnnnnnnnnnnnnnnnnnnnnnnnnnnnnnnnnnnnnnnnnnnnnnnnnnnnnnnnnnnnnnnnnnnnnnnnnnnnnnnnnnnnnnnnnnnnnnnnnnnnnnnnnnnnnnnnnnnnnnnnnnnnnnnnnnnnnnnnnnnnnnnnnnnnnnnnnnnnnnnnnnnnnnnn

SEQ ID NO: 4321 - DNA, 575 bp, Xenorhabdus sp.
  unsure (1)..(575): unsure at all n locations
nnnnnnnnnnnnnnnnnnnnnnnnnnnnnnnnnnnnnnnnnnnnnnnnnnnnnnnnnnnnnnnnnnnnnnnnnnnnnnnnnnnnngctgcatcgttgctgatctttaaccctcataacaccctgtgtttatgcctggggtacctgaatcagggagtcgaccatggttaatgataaaaaacttaagggctccatccatggacctgctttcatgcatcatgaggaaactttagcaggattatcccaacactataatgaatttgccttatatccggggccaatcattgcatttgttaccggttagagacagatgtttgaccgcactagctacctgatgaccaatctacagggaattatagaaacactgaatgacttatattaattannnnnnnnnnnnnnnnnnnnnnnnnnnnnnnnnnnnnnnnnnnnnnnnnnnnnnnnnnnnnnnnnnnnnnnnnnnnnnnnnnnnnnnnnnnnnnnnnnnnnnnnnnnnnnnnnnnnnnnnnnnnnnnnnnnnnnnnnnnnnnnnnnnnnnnnnnnnnnnnnnnnnnnnnnnnnnnnnnnnnnnnnnnnnnnn

SEQ ID NO: 4322 - DNA, 1024 bp, Xenorhabdus sp.
  unsure (1)..(1024): unsure at all n locations
nnnnnnnnnnnnnnnnnnnnnnnnnnnnnnnnntgtgctctaaaggggacgaggcctcctgtattcacgcccctgttcagccctgatgagcatgcgctgtatgcgcacactgttcgcgaattgacaggagccttgtgctgtctttaatatctggcaactgggggaacaggatctggtcgtgaacaagctacccgcgcttcttctttggcgggagctgatcgtacattgcccggtgaggcatagcaaatgctccctgtcattcttctgtttgtgccccccactgttgtatcccgtactgtatgcatccgccgaacccatgccttagatgctttgttacccgatctgcctagttctatcccagacccgctatatgggctggcagatgatggcgggaaagacttaattcccggaatnnnnnnnnnnnnnnnnnnnnnnnnnnnnnnnnnnnnnnnnnnnnnnnnnnnnnnnnnnnnnnnnnnnnnnnnnnnnnnnnnnnnnnnnnnnnnnnnnnnnnnnnnnnnnnnnnnnnnnnnnnnnnnnnnnnnnnnnnnnnnnnnnnnnnnnnnnnnnnnnnnnnnnnnnnnnnnnnnnnnnnnnnnnnnnnnnnnnnnnnnnnnnnnnnnnnnnnnnnnnnnnnnnnnnnnnnnnnnnnnnnnnnnnnnnnnnnnnnnnnnnnnnnnnnnnnnnnnnnnnnnnnnnnnnnnnnnnnnnnnnnnnnnnnnnnnnnnnnnnnnnnnnnnnnnnnnnnnnnnnnnnnnnnnnnnnnnnnnnnnnnnnnnnnnnnnnnnnnnnnnnnnnnnnnnnnnnnnnnnnnnnnnnnnnnnnnnnnnnnnnnnnnnnnnnnnnnnnnnnnnnnnnnnnnnnnnnnnnnnnnnnnnnnnnnnnnnnnnnnnnnnnnnnnnnnnnnnnnnnnnnnnnnnnnnnnnnnnnnnnnnnnnnnnnnnnnnnnnnnnnnnnnnnnnnnnnnnnnnnnnnnnnnnnnnnnnnnnnnnnnnnnnnnnnnnnnnnnnnnnnnnnnnnnnnn

SEQ ID NO: 4323 - DNA, 723 bp, Xenorhabdus sp.
  unsure (1)..(723): unsure at all n locations
nnnnnnnnnnnnnnnnnnnnnnnnnnnnnnnnnnnnnnnnnnnnnnnnnnnnnnnnnnnnnnnnnnnnnnnnnnnnnnnnnnnnnnnnnnnnnnnnnnnnnnnnnnnnnnnnnnnnnnnnnnnnnnnnnnnnnnnnnnnnnnnnnnnnnnnnnnnnnnnnnnnnnnnnnnnnnnnnnnnnnnnnnnnnnnnnnnnnnnnnnnnnnnnnnnnnnnnnnnnnnnnnnnnnnnnnnnnnnnnnnnnnnnnnnnnnnnnnnnnnnnnnnnnnnnnnnnnnnncacgttctgaatacatgattgaataggccccactgtcatcccaacctacgtctgcagactctaccgctagacctactagacgatcacctaccctagggatttggccatagccatttgcaccttnnnnnnnnnnnnnnnnnnnnnnnnnnnnnnnnnnnnnnnnnnnnnnnnnnnnnnnnnnnnnnnnnnnnnnnnnnnnnnnnnnnnnnnnnnnnnnnnnnnnnnnnnnnnnnnnnnnnnnnnnnnnnnnnnnnnnnnnnnnnnnnnnnnnnnnnnnnnnnnnnnnnnnnnnnnnnnnnnnnnnnnnnnnnnnnnnnnnnnnnnnnnnnnnnnnnnnnnnnnnnnnnnnnnnnnnnnnnnnnnnnnnnnnnnnnnnnnnnnnnnnnnnnnnnnnnnnnnnnnnnnnnnnnnnnnnnnnnnnnnnnnnnnnnnnnnnnnnnnnnnn

SEQ ID NO: 4324 - DNA, 987 bp, Xenorhabdus sp.
  unsure (1)..(987): unsure at all n locations
nnnnnnnnnnnnnnnnnnnnnnnnnnnnnnnntctaaagcgcttacatcaatgggggcgaagggtgtgccagacaaaagcgtgagcgtgctctgaaggaacagggtccttttggccatattcgcataaaaccgggtggaggtctgcccctataagcctgcccagaaggccgaactgggggaatgccgaggaccctggcacacggacaacctatatgtgggacactctgtgatgtgggtgcaaaactaattcccacaacatgccagctggaagcccttcttgctatgaccatgacagcaacctgctgggataaggaacctctgaatcaatgccaataagcggctatgcgtgcgtttaacttccaaggtgggagggaaaactgatgcggttgcacttttttcgcagaaccagcatcaaggagannnnnnnnnnnnnnnnnnnnnnnnnnnnnnnnnnnnnnnnnnnnnnnnnnnnnnnnnnnnnnnnnnnnnnnnnnnnnnnnnnnnnnnnnnnnnnnnnnnnnnnnnnnnnnnnnnnnnnnnnnnnnnnnnnnnnnnnnnnnnnnnnnnnnnnnnnnnnnnnnnnnnnnnnnnnnnnnnnnnnnnnnnnnnnnnnnnnnnnnnnnnnnnnnnnnnnnnnnnnnnnnnnnnnnnnnnnnnnnnnnnnnnnnnnnnnnnnnnnnnnnnnnnnnnnnnnnnnnnnnnnnnnnnnnnnnnnnnnnnnnnnnnnnnnnnnnnnnnnnnnnnnnnnnnnnnnnnnnnnnnnnnnnnnnnnnnnnnnnnnnnnnnnnnnnnnnnnnnnnnnnnnnnnnnnnnnnnnnnnnnnnnnnnnnnnnnnnnnnnnnnnnnnnnnnnnnnnnnnnnnnnnnnnnnnnnnnnnnnnnnnnnnnnnnnnnnnnnnnnnnnnnnnnnnnnnnnnnnnnnnnnnnnnnnnnnnnnnnnnnnnnnnnnnnnnnnnnnnnnnnnnnnnnnnnnnnnnnnnnnnnnnn

SEQ ID NO: 4325 - DNA, 482 bp, Xenorhabdus sp.
  unsure (1)..(482): unsure at all n locations
nnnnnnnctctaaacgccacatctgctgaaatatcatgacattctggatttctcgctggatccataactatatagatcannnnnnnnnnnnnnnnnnnnnnnnnnnnnnnnnnnnnnnnnnnnnnnnnnnnnnnnnnnnnnnnnnnnnnnnnnnnnnnnnnnnnnnnnnnnnnnnnnnnnnnnnnnnnnnnnnnnnnnnnnnnnnnnnnnnnnnnnnnnnnnnnnnnnnnnnnnnnnnnnnnnnnnnnnnnnnnnnnnnnnnnnnnnnnnnnnnnnnnnnnnnnnnnnnnnnnnnnnnnnnnnnnnnnnnnnnnnnnnnnnnnnnnnnnnnnnnnnnnnnnnnnnnnnnnnnnnnnnnnnnnnnnnnnnnnnnnnnnnnnnnnnnnnnnnnnnnnnnnnnnnnnnnnnnnnnnnnnnnnnnnnnnnnnnnnnnnnnnnnnnnnnnnnnnnnnnnnnnnnnnnnnnnnnnnnnnnnnnnnnnn

SEQ ID NO: 4326 - DNA, 383 bp, Xenorhabdus sp.
  unsure (1)..(383): unsure at all n locations
nnnnnnnnnnnnnnnnnnnnnnngttgctgatcagccggatcactgacgtgatagtgaattttctaatgagttggcccttttcatcatttcaacgtacagagacccgataccggatttgaatcagtagtattgtttatatcttggaaagagcggttgggttgatccccacaaggcaaaccgaattnnnnnnnnnnnnnnnnnnnnnncccttttttcaaagtggattnnnnnnnnnnnnnnnnnnnnnnnnnnnnnnnnnnnnnnnnnnnnnnnnnnnnnnnnnnnnnnnnngggagggtgtgggtggtgggnggngggggggggggggggggggggggggggggggggggggggggggnttgttttttttttgtttttnnnn

SEQ ID NO: 4327 - DNA, 589 bp, Xenorhabdus sp.
  unsure (1)..(589): unsure at all n locations
nnagtgtgctctaaagcgggaggcaattcgnccgcatctcttcggaaatttcgaagagatgctcatcgcggtcgagacccacccggcaatgctgttctttctcgacaaccagcaatcggtcggaccgaactcgagggccaacaggaacggcaagcgcggcctcaacgaaaatctggcgcgcgaaatcatggagctntatacgctcggcgtggatggcggctacacgcaagcggacgtgacttcgctggcccggatcattaccggctggggtggntatcgcgatgaaaacatcccggcccatggggcgtttctatttaacgacnnnnnnnnnnnnnnnnnnnnnnnnnnnnnnnnnnnnnnnnnnnnnnnnnnnnnnnnnnnnnnnnnnnnnnnnnnnnnnnnnnnnnnnnnnnnnnnnnnnnnnnnnnnnnnnnnnnnnnnnnnnnnnnnnnnnnnnnnnnnnnnnnnnnnnnnnnnnnnnnnnnnnnnnnnnnnnnnnnnnnnnnnnnnnnnnnnnnnnnnnnnnnnnnnnnnnnnnnnnnnnnnnnnnnnnnnnnnnnnnnnnnnnnnnnnnnnnnnnnnnnnnnnn

SEQ ID NO: 4328 - DNA, 612 bp, Xenorhabdus sp.
  unsure (1)..(612): unsure at all n locations
ctgctcgagccatgtgctctaaaggggtccgtctgtccgtagagatcggcgaggcgcggcgcgagatcgccatccgcgggtttgagaatggcgggtgaccagccgaggatcggcgccttgccgcgaatgaccagcggcgcgctggcgcccacggcaaggccgcgcaggccgccgccggaaacagggttgatggtttcaccggccggcatttgctcaagcagccggttcagccagccggtcttcacatgaccgggcgttggaaatccggattcgagtaccgtctggccgtcgaaatgcgaacggtcgcgatatcccgtcgcgctggcatgcacgatcgctgcctcgccttttctgtaaagcctctggaagttgcgaagagaacggtgcagggcacaaaagccgtccagttcgannnnnnnnnnnnnnnnnnnnnnnnnnnnnnnnnnnnnnnnnnnnnnnnnnnnnnnnnnnnnnnnnnnnnnnnnnnnnnnnnnnnnnnnnnnnnnnnnnnnnnnnnnnnnnnnnnnnnnnnnnnnnnnnnnnnnnnnnnnnnnnnnnnnnnnnnnnnnnnnnnnnnnnnnnnnnnnnnnnnnnnnnnnnnnnnnnnnnnnn

SEQ ID NO: 4329 - DNA, 400 bp, Xenorhabdus sp.
  unsure (1)..(400): unsure at all n locations
nnnnnnnnnnnnnnnnnnnnnnnnnnnnnnnnnnnnnnnnnnnnnnnnnnnnnnnnnnnnnnnnnnnnnnnnnnnnnnnnnnnnnnnnnnnnnnnnnnnnnnnnnnnnnnnnnnnnnnnnnnnnnnnnnnnnnnnnnnnnnccccccccctttttttttttttnttnggggggggggggggggggnngggggggtttttttggggggaaaaaaaaaaggcccccaaaaagcccaaaacctttttggggaggnaaaaaaaaaaaaaaaaaaaccccccccctttttttttttgggggggggggggggggggggaaaaaaaaaaaaaaaaaaaaaaaaaaaaaaaaaaaaaaaaaaaaaaaaaaaaaaaaaaaagaaggagggggaaaaaaaaaaaaannnn

SEQ ID NO: 4330 - DNA, 987 bp, Xenorhabdus sp.
  unsure (1)..(987): unsure at all n locations
nnnnnnnnnnnnnnnnnagtgtgctctaaaggcgccagcggcgcaagatcggcaacgacagtgcgggcgatctccaccagatcgaccgtctcccaccggtcatgcacctgatcgttccgctcgaccgccagaagctgttccgtggtttcgccgagccgtgcgacatcctccatcagccgctgccgttccggcccttccggcaggccctctatccgggtctgcatgatggcgatcggtgttctgagttcatgcgccgcgtcgatgagaaaacgctggcgtgcccgaaactgctgctcgagccgttcgaggatgctgttgaaggatacgatcagcggcacgacttcgcgtggcacatcctcgacgggcagcttcgcgcccgcccggggcggggtcgatctccggggctttccggacgacggaactgagaccggcgagcgcctggcgcacgatgcggggcacggaaannnnnnnnnnnnnnnnnnnnnnnnnnnnnnnnnnnnnnnnnnnnnnnnnnnnnnnnnnnnnnnnnnnnnnnnnnnnnnnnnnnnnnnnnnnnnnnnnnnnnnnnnnnnnnnnnnnnnnnnnnnnnnnnnnnnnnnnnnnnnnnnnnnnnnnnnnnnnnnnnnnnnnnnnnnnnnnnnnnnnnnnnnnnnnnnnnnnnnnnnnnnnnnnnnnnnnnnnnnnnnnnnnnnnnnnnnnnnnnnnnnnnnnnnnnnnnnnnnnnnnnnnnnnnnnnnnnnnnnnnnnnnnnnnnnnnnnnnnnnnnnnnnnnnnnnnnnnnnnnnnnnnnnnnnnnnnnnnnnnnnnnnnnnnnnnnnnnnnnnnnnnnnnnnnnnnnnnnnnnnnnnnnnnnnnnnnnnnnnnnnnnnnnnnnnnnnnnnnnnnnnnnnnnnnnnnnnnnnnnnnnnnnnnnnnnnnnnnnnnnnnnnnnnnnnnnnnnnnnnnnnnnnnnnnnnnnnnnnnnnnnnnnnnnnnnnnnnnnnnnnn

SEQ ID NO: 4331 - DNA, 1167 bp, Xenorhabdus sp.
  unsure (1)..(1167): unsure at all n locations
nnnnnnnnnnnnnnnnnnnnnnnnnnnctctaaaggcctgaatcgttttgagtgccagccgaagtaaacggaaaaacccgtgcattttcgcacccggctgatgcgctcgacggtgctcgggacggtctggccgctgacgccgtcgatctccagttccgctgtctggcccagcgcaacacgcggaatgtcgcgggtggcgacgaggaccttcgcctccagaacgcttgtatcgaccagcgtcagaagctcgccgtcggcgccgacgcgtgcgccggcctcggccagccggcgcgtgacggtgccgctgaaaggcgcgcggatttccgcattgcgcagggcgaggcgggcaatatcggcctgtgccgaaaggctctgaacccttgccgttttcaccaccacatcgcttttcgccttgtccagctgttcggctgacgcaatgttcttggcggcaagctgttccgtcctcgtcagggcctgcatcgccagcgtcaattcggcctcggccgcatcccggtcgctttgccgttgcagcagcgcnnnnnnnnnnnnnnnnnnnnnnnnnnnnnnnnnnnnnnnnnnnnnnnnnnnnnnnnnnnnnnnnnnnnnnnnnnnnnnnnnnnnnnnnnnnnnnnnnnnnnnnnnnnnnnnnnnnnnnnnnnnnnnnnnnnnnnnnnnnnnnnnnnnnnnnnnnnnnnnnnnnnnnnnnnnnnnnnnnnnnnnnnnnnnnnnnnnnnnnnnnnnnnnnnnnnnnnnnnnnnnnnnnnnnnnnnnnnnnnnnnnnnnnnnnnnnnnnnnnnnnnnnnnnnnnnnnnnnnnnnnnnnnnnnnnnnnnnnnnnnnnnnnnnnnnnnnnnnnnnnnnnnnnnnnnnnnnnnnnnnnnnnnnnnnnnnnnnnnnnnnnnnnnnnnnnnnnnnnnnnnnnnnnnnnnnnnnnnnnnnnnnnnnnnnnnnnnnnnnnnnnnnnnnnnnnnnnnnnnnnnnnnnnnnnnnnnnnnnnnnnnnnnnnnnnnnnnnnnnnnnnnnnnnnnnnnnnnnnnnnnnnnnnnnnnnnnnnnnnnnnnnnnnnnnnnnnnnnnnnnnnnnnnnnnnnnnnnnnnnnnnnnnnnnnnnnnnnnnnnnnnnnnnnnnnnnnnnnnnnnnnnnnnnnnnnnnnnnnnnnnnnnnnnnn

SEQ ID NO: 4332 - DNA, 964 bp, Xenorhabdus sp.
  unsure (1)..(964): unsure at all n locations
nnnnnnnnnnnnnnnnnnnnnnncatgtgctctaaagtatttatctaacggaggagcatggaggatggagagtgtatcgacgctatattttaattggacacaaagagaaacggaccgttgcgtacttactgaaatgcacacgttccttaggtcctggacataacagcgattgcaggcggttttgagattccatataaaagatggagagatacgaagtggtaaagccgtggctttatgctgaacaacccaaaaaaagacatatgctgaatagatatcagtccggtctgtgccatcgtgatagcatgaacactcggggcgattcctgataaaacacctgcgattgctaaagcacaggttaatggtcagactagaacgcttgggacacccagacagaatatagtgcttgctgattgggtgttggcacataatctggcactgaccctatacagtggtatacagagcggagaaggaaaacctctggatgccacataaccgtgggtatgcacgttcatacccgcgggactagagagagatacttgatgttggggggtgactgaacggacctataatcataaaacggccggacnnnnnnnnnnnnnnnnnnnnnnnnnnnnnnnnnnnnnnnnnnnnnnnnnnnnnnnnnnnnnnnnnnnnnnnnnnnnnnnnnnnnnnnnnnnnnnnnnnnnnnnnnnnnnnnnnnnnnnnnnnnnnnnnnnnnnnnnnnnnnnnnnnnnnnnnnnnnnnnnnnnnnnnnnnnnnnnnnnnnnnnnnnnnnnnnnnnnnnnnnnnnnnnnnnnnnnnnnnnnnnnnnnnnnnnnnnnnnnnnnnnnnnnnnnnnnnnnnnnnnnnnnnnnnnnnnnnnnnnnnnnnnnnnnnnnnnnnnnnnnnnnnnnnnnnnnnnnnnnnnnnnnnnnnnnnnnnnnnnnnnnnnnnnnnnnnnnnnnnnnnnnnnnnnnnnnnnnnn

SEQ ID NO: 4333 - DNA, 917 bp, Xenorhabdus sp.
  unsure (1)..(917): unsure at all n locations
nnnnnnnnnnnnnnnnnnnnnnnnnnctaaagctttagagatccaatgaatcaatggcttgtatatatctcttccgtcttttttctctctgaaaacacaccggaaacgggcctcggtccggcttgacaggcggagatgacatctaatagtaatacaaataaatagattggcttgagacggggcgcggcgccaaaaggccagccgccatccggagaggcagggagggagagaccgttgcgcaatgccgctgtcgtcgtaaatgccgaaaaatattcggctaaagccgaagaagggccccgatccactcgtctggaccggctctgtcggttatgcgtgatctccgaaagctgattccattttccttgcgcacaacataagcttgtcgcatttcgtaatattttaccgttggccacttccggctggagacctgcatcatgaccaaatccgacaatctgcctgcaacccaaggtaaacttcgttcgcgcgcgtggttcgacaaccccgccaatgcggatatgacggcactttatctcgagcgttacatgaacttcggtctgannnnnnnnnnnnnnnnnnnnnnnnnnnnnnnnnnnnnnnnnnnnnnnnnnnnnnnnnnnnnnnnnnnnnnnnnnnnnnnnnnnnnnnnnnnnnnnnnnnnnnnnnnnnnnnnnnnnnnnnnnnnnnnnnnnnnnnnnnnnnnnnnnnnnnnnnnnnnnnnnnnnnnnnnnnnnnnnnnnnnnnnnnnnnnnnnnnnnnnnnnnnnnnnnnnnnnnnnnnnnnnnnnnnnnnnnnnnnnnnnnnnnnnnnnnnnnnnnnnnnnnnnnnnnnnnnnnnnnnnnnnnnnnnnnnnnnnnnnnnnnnnnnnnnnnnnnnnnnnnnnnnnnnnnnnnnnnnnnnnnnnnnnnnnnnnnnnnnnn

SEQ ID NO: 4334 - DNA, 860 bp, Xenorhabdus sp.
  unsure (1)..(860): unsure at all n locations
agccccggggcggcaccccggggctgatttttagctgatttttaaaagcggccggccgaaacggccttgcctttagtggttgtcgcgcggcaggcccttggtctgggcgatgcgctggtacttgaccgccggctccagaaccgcgccggtttccatctggctgacgatgccacgctggatttcctgccatggggtctggtggtccgggaatttgtaaccgccctcagccgacagcgcctcgtaacgcttggccagttcttcgcctgatatcaggatatccgccttgccacggcccacatcgatgcggacacggtcgcccgtctgcaggatggcgagaccgccgccggccgccgcttccggggaagcgttgaggatggacgggctgcccgacgtgccggactggcggccgtcgccgatgcagggcagcgaattcacacctnnnnnnnnnnnnnnnnnnnnnnnnnnnnnnnnnnnnnnnnnnnnnnnnnnnnnnnnnnnnnnnnnnnnnnnnnnnnnnnnnnnnnnnnnnnnnnnnnnnnnnnnnnnnnnnnnnnnnnnnnnnnnnnnnnnnnnnnnnnnnnnnnnnnnnnnnnnnnnnnnnnnnnnnnnnnnnnnnnnnnnnnnnnnnnnnnnnnnnnnnnnnnnnnnnnnnnnnnnnnnnnnnnnnnnnnnnnnnnnnnnnnnnnnnnnnnnnnnnnnnnnnnnnnnnnnnnnnnnnnnnnnnnnnnnnnnnnnnnnnnnnnnnnnnnnnnnnnnnnnnnnnnnnnnnnnnnnnnnnnnnnnnnnnnnnnnnnnnnnnnnnnnnnnnnnnnnnnnnnnnnnnnnnnnnnnnnnnnnnnnnnnnnnnnnnnnnnnnnnnn

SEQ ID NO: 4335 - DNA, 705 bp, Xenorhabdus sp.
  unsure (1)..(705): unsure at all n locations
nnnnnnnnnnnnnnnnnnnnnnnnnnngtgctctaaaggcatggggacctatctctcaacctctaattgctgttcttcctttattctctgacatatggagtctctcctcatggactctgagatattggcatggattttgtactacacgttctatatgatagaccgctttcataccttattagcggctctttacccgaactccactcctcctattgactctgagagcctgggtttggttaccccctctgattgatactctattatggacacacagcgtttcccttatctgagatccatattgcacctgatgtgcaacgctcattatcaactgannnnnnnnnnnnnnnnnnnnnnnnnnnnnnnnnnnnnnnnnnnnnnnnnnnnnnnnnnnnnnnnnnnnnnnnnnnnnnnnnnnnnnnnnnnnnnnnnnnnnnnnnnnnnnnnnnnnnnnnnnnnnnnnnnnnnnnnnnnnnnnnnnnnnnnnnnnnnnnnnnnnnnnnnnnnnnnnnnnnnnnnnnnnnnnnnnnnnnnnnnnnnnnnnnnnnnnnnnnnnnnnnnnnnnnnnnnnnnnnnnnnnnnnnnnnnnnnnnnnnnnnnnnnnnnnnnnnnnnnnnnnnnnnnnnnnnnnnnnnnnnnnnnnnnnnnnnnnnnnnnnnnnnnnnnnnnnnnnnnnnnnnnnnnnnnnnnnnnnnnnnnnnnnnnnnn

SEQ ID NO: 4336 - DNA, 1025 bp, Xenorhabdus sp.
  unsure (1)..(1025): unsure at all n locations
nnnnnnnnnnnnnnnnnnnnnnnnnnnnnnnnnnnnctaaaggaggagggcaaatcattgatgccaggttggtcccggggcctatacacaacactttgtgggagttattatgaatatttatgccagagtgaatcctggtgaatatggtctggtgagcaagtgaaggctgacaaccccccgggatactggtaaaattgggccggagggggttaatttgtgtcccaatgttcccctactgctgattcatagattaaaatgttccgacagataccatcaagaaccgtgtgatggccagacaaccagattnnnnnnnnnnnnnnnnnnnnnnnnnnnnnnnnnnnnnnnnnnnnnnnnnnnnnnnnnnnnnnnnnnnnnnnnnnnnnnnnnnnnnnnnnnnnnnnnnnnnnnnnnnnnnnnnnnnnnnnnnnnnnnnnnnnnnnnnnnnnnnnnnnnnnnnnnnnnnnnnnnnnnnnnnnnnnnnnnnnnnnnnnnnnnnnnnnnnnnnnnnnnnnnnnnnnnnnnnnnnnnnnnnnnnnnnnnnnnnnnnnnnnnnnnnnnnnnnnnnnnnnnnnnnnnnnnnnnnnnnnnnnnnnnnnnnnnnnnnnnnnnnnnnnnnnnnnnnnnnnnnnnnnnnnnnnnnnnnnnnnnnnnnnnnnnnnnnnnnnnnnnnnnnnnnnnnnnnnnnnnnnnnnnnnnnnnnnnnnnnnnnnnnnnnnnnnnnnnnnnnnnnnnnnnnnnnnnnnnnnnnnnnnnnnnnnnnnnnnnnnnnnnnnnnnnnnnnnnnnnnnnnnnnnnnnnnnnnnnnnnnnnnnnnnnnnnnnnnnnnnnnnnnnnnnnnnnnnnnnnnnnnnnnnnnnnnnnnnnnnnnnnnnnnnnnnnnnnnnnnnnnnnnnnnnnnnnnnnnnnnnnnnnnnnnnnnnnnnnnnnnnnnnnnnnnnnnnnnnnnnnnnnnnnnnnnnnnnnnnnnnnnnnnnnnnnnnnnnnnnnnnnnnnnnnnnnnnnnnnnnnnnnnnnnnnnnnnnnnn

SEQ ID NO: 4337 - DNA, 992 bp, Xenorhabdus sp.
  unsure (1)..(992): unsure at all n locations
nnnnnnnnnnnnnnnnnnnnnnnnnnnnnnnnnnnnnnctctttggatattagcatcgatatgggcgcactccgctaaattattctgtgtggcggcagatatatcgtgtcgattttttatcagccatgcggttctgtcgcgcaattgcagcacctgaatcaatcaatctcgtgccattaggcagaacctgaaacggttcctctgcgggtgaaggcaaatgagtacgttcccaaaatattactgccaggagggtcttttcttcccagccatggtttcaatattatgtccagtcctttcacaggaatgatgccaacgggccacttttgaactgacggtacgacctggtccttatgagccgatagcgagaacctgacactacgaatcggatctggggatgaaatgcctagtgtagacaccatagcatgtagcccctgataggcaatatcccaannnnnnnnnnnnnnnnnnnnnnnnnnnnnnnnnnnnnnnnnnnnnnnnnnnnnnnnnnnnnnnnnnnnnnnnnnnnnnnnnnnnnnnnnnnnnnnnnnnnnnnnnnnnnnnnnnnnnnnnnnnnnnnnnnnnnnnnnnnnnnnnnnnnnnnnnnnnnnnnnnnnnnnnnnnnnnnnnnnnnnnnnnnnnnnnnnnnnnnnnnnnnnnnnnnnnnnnnnnnnnnnnnnnnnnnnnnnnnnnnnnnnnnnnnnnnnnnnnnnnnnnnnnnnnnnnnnnnnnnnnnnnnnnnnnnnnnnnnnnnnnnnnnnnnnnnnnnnnnnnnnnnnnnnnnnnnnnnnnnnnnnnnnnnnnnnnnnnnnnnnnnnnnnnnnnnnnnnnnnnnnnnnnnnnnnnnnnnnnnnnnnnnnnnnnnnnnnnnnnnnnnnnnnnnnnnnnnnnnnnnnnnnnnnnnnnnnnnnnnnnnnnnnnnnnnnnnnnnnnnnnnnnnnnnnnnnnnnnnnnnnnnnnnnnnnnnnnnnnnnnnnnnnnnnnnnnnnnnnnnn

SEQ ID NO: 4338 - DNA, 949 bp, Xenorhabdus sp.
  unsure (1)..(949): unsure at all n locations
nnnnnnnnnnnnnnnnnnnnnnnnnnnnnnnnnnnnnnnnnnnnnnnnnnnnnnnnnnnnnnnnnnnnnngttatatgggtgccctgtagtgacaagggactagcacttcatacacgttataaaccgtctacagcaccgtgaccctgctttattctgaaggaggaattgcggtggctttgatgtatacccaaatcatacaatcacttgggcggaataaaaagactggaaccgaataggataatctatcctataacaatacactggctgatactaataactaacactgaacacctttgagaatataagaacttcctaatcatgggatggcctttggnnnnnnnnnnnnnnnnnnnnnnnnnnnnnnnnnnnnnnnnnnnnnnnnnnnnnnnnnnnnnnnnnnnnnnnnnnnnnnnnnnnnnnnnnnnnnnnnnnnnnnnnnnnnnnnnnnnnnnnnnnnnnnnnnnnnnnnnnnnnnnnnnnnnnnnnnnnnnnnnnnnnnnnnnnnnnnnnnnnnnnnnnnnnnnnnnnnnnnnnnnnnnnnnnnnnnnnnnnnnnnnnnnnnnnnnnnnnnnnnnnnnnnnnnnnnnnnnnnnnnnnnnnnnnnnnnnnnnnnnnnnnnnnnnnnnnnnnnnnnnnnnnnnnnnnnnnnnnnnnnnnnnnnnnnnnnnnnnnnnnnnnnnnnnnnnnnnnnnnnnnnnnnnnnnnnnnnnnnnnnnnnnnnnnnnnnnnnnnnnnnnnnnnnnnnnnnnnnnnnnnnnnnnnnnnnnnnnnnnnnnnnnnnnnnnnnnnnnnnnnnnnnnnnnnnnnnnnnnnnnnnnnnnnnnnnnnnnnnnnnnnnnnnnnnnnnnnnnnnnnnnnnnnnnnnnnnnnnnnnnnnnnnnnnnnnnnnnnnnnnnnnnnnnnnnnnnnnnnnnnnnnnnnnnnnnnnnnnnnnnnnnnnnnnnnnnn

SEQ ID NO: 4339 - DNA, 944 bp, Xenorhabdus sp.
  unsure (1)..(944): unsure at all n locations
nnnnnnnnnnnnnnnnnnnnnnnnnnnngctctaaagcactttaaaattgaccactctggagtcataaactttccgtgccaaaacatgcggaaacagatctcctacactcacatgttacagcggatgagcgggagcaggatgcattctgtataaccatacctaacatgacattatctggaggactgagtcacactaaaattactatgtacagacacatgaaaggagaccgtgcattccctggaacccgaatgacgctacactattattttactggcaacgaaattcaataacgtacccggttctgtcacattaattgtcaaattctaccaaaaacagttatccacaaccattttatatttcgaaaccacccaatgaagaacatacaagcnnnnnnnnnnnnnnnnnnnnnnnnnnnnnnnnnnnnnnnnnnnnnnnnnnnnnnnnnnnnnnnnnnnnnnnnnnnnnnnnnnnnnnnnnnnnnnnnnnnnnnnnnnnnnnnnnnnnnnnnnnnnnnnnnnnnnnnnnnnnnnnnnnnnnnnnnnnnnnnnnnnnnnnnnnnnnnnnnnnnnnnnnnnnnnnnnnnnnnnnnnnnnnnnnnnnnnnnnnnnnnnnnnnnnnnnnnnnnnnnnnnnnnnnnnnnnnnnnnnnnnnnnnnnnnnnnnnnnnnnnnnnnnnnnnnnnnnnnnnnnnnnnnnnnnnnnnnnnnnnnnnnnnnnnnnnnnnnnnnnnnnnnnnnnnnnnnnnnnnnnnnnnnnnnnnnnnnnnnnnnnnnnnnnnnnnnnnnnnnnnnnnnnnnnnnnnnnnnnnnnnnnnnnnnnnnnnnnnnnnnnnnnnnnnnnnnnnnnnnnnnnnnnnnnnnnnnnnnnnnnnnnnnnnnnnnnnnnnnnnnnnnnnnnnnnnnnnnnnnnnnnnnnnnnnnnnnnnnnnnnnnnnnnnnnnnnnn

SEQ ID NO: 4340 - DNA, 1262 bp, Xenorhabdus sp.
  unsure (1)..(1262): unsure at all n locations
nnnnnnnnnnnnnnnnnnnnnnnnnnnnnnnnnnnnnnnnnnnnnnnnnnctgaatgctaataaaaatttatattctataagaaacccatgaaaaacannggaggtagttgttttaaaaaaggaggggggcccncccaaacgttttgtttgttattttttatgcaaactaaggaactggttaaatagttaattttttataaaaagaatattattataaataattaaaaaattattttatataatgatttaatattataatatttaattaaatnnnnnnnnnnnnnnnnnnnnnnnnnnnnnnnnnnnnnnnnnnnnnnnnnnnnnnnnnnnnnnnnnnnnnnnnnnnnnnnnnnnnnnnnnnnnnnnnnnnnnnnnnnnnnnnnnnnnnnnnnnnnnnnnnnnnnnnnnnnnnnnnnnnnnnnnnnnnnnnnnnnnnnnnnnnnnnnnnnnnnnnnnnnnnnnnnnnnnnnnnnnnnnnnnnnnnnnnnnnnnnnnnnnnnnnnnnnnnnnnnnnnnnnnnnnnnnnnnnnnnnnnnnnnnnnnnnnnnnnnnnnnnnnnnnnnnnnnnnnnnnnnnnnnnnnnnnnnnnnnnnnnnnnnnnnnnnnnnnnnnnnnnnnnnnnnnnnnnnnnnnnnnnnnnnnnnnnnnnnnnnnnnnnnnnnnnnnnnnnnnnnnnnnnnnnnnnnnnnnnnnnnnnnnnnnnnnnnnnnnnnnnnnnnnnnnnnnnnnnnnnnnnnnnnnnnnnnnnnnnnnnnnnnnnnnnnnnnnnnnnnnnnnnnnnnnnnnnnnnnnnnnnnnnnnnnnnnnnnnnnnnnnnnnnnnnnnnnnnnnnnnnnnnnnnnnnnnnnnnnnnnnnnnnnnnnnnnnnnnnnnnnnnnnnnnnnnnnnnnnnnnnnnnnnnnnnnnnnnnnnnnnnnnnnnnnnnnnnnnnnnnnnnnnnnnnnnnnnnnnnnnnnnnnnnnnnnnnnnnnnnnnnnnnnnnnnnnnnnnnnnnnnnnnnnnnnnnnnnnnnnnnnnnnnnnnnnnnnnnnnnnnnnnnnnnnnnnnnnnnnnnnnnnnnnnnnnnnnnnnnnnnnnnnnnnnnnnnnnnnnnnnnnnnnnnnnnnnnnnnnnnnnnnnnnnnnnnnnnnnnnnnnnnnnnnnnnnnnnnnnnnnnnnnnnnnnnnnnnnnnnnnnnnnnnnnnnnnnnnnnnnnnnnnnnnnnnnnnnnnnnnnnnnnnnnnnnnnnnnnnnnnnnnnnnnnnnnnnnnnnnnnnnnnnn

SEQ ID NO: 4341 - DNA, 849 bp, Xenorhabdus sp.
  unsure (1)..(849): unsure at all n locations
nnnnnnnnnnnnnnnnnnnnnnnnnnnnnnnnnnnnnnnnnnnnnnnnnnnnnnaccgaacaattttatggttcaagccggaatttttatttttggccggcgtattgnccannnngagaggggtttttcaaaaannnnnnnnnnnnnnnnnnnnnnnnnnnnnnnnnnnnnnnnnnnnnnnnnnnnnnnnnnnnnnnnnnnnnnnnnnnnnnnnnnnnnnnnnnnnnnnnnnnnnnnnnnnnnnnnnnnnnnnnnnnnnnnnnnnnnnnnnnnnnnnnnnnnnnnnnnnnnnnnnnnnnnnnnnnnnnnnnnnnnnnnnnnnnnnnnnnnnnnnnnnnnnnnnnnnnnnnnnnnnnnnnnnnnnnnnnnnnnnnnnnnnnnnnnnnnnnnnnnnnnnnnnnnnnnnnnnnnnnnnnnnnnnnnnnnnnnnnnnnnnnnnnnnnnnnnnnnnnnnnnnnnnnnnnnnnnnnnnnnnnnnnnnnnnnnnnnnnnnnnnnnnnnnnnnnnnnnnnnnnnnnnnnnnnnnnnnnnnnnnnnnnnnnnnnnnnnnnnnnnnnnnnnnnnnnnnnnnnnnnnnnnnnnnnnnnnnnnnnnnnnnnnnnnnnnnnnnnnnnnnnnnnnnnnnnnnnnnnnnnnnnnnnnnnnnnnnnnnnnnnnnnnnnnnnnnnnnnnnnnnnnnnnnnnnnnnnnnnnnnnnnnnnnnnnnnnnnnnnnnnnnnnnnnnnnnnnnnnnnnnnnnnnnnnnnnnnnnnnnnnnnnnnnnnnnnnnnnnnnnnnnnnnnnnnnnnnnnnnnnnnnnnnnnnnnnnnnnnnnnnnnnnnnnnnnnnnnnnnnnnnnnnnnnnnnnnn

SEQ ID NO: 4342 - DNA, 1142 bp, Xenorhabdus sp.
  unsure (1)..(1142): unsure at all n locations
nnnnnnnnnnnnnnnnnnnnnnnnnnnnnnnnnnnnnnnnnnnnnnnnnnnnnnnnnaaggtggttgattctttttgttggtttattgatgtgtgttgagggggtgaagtaatgctttgcggggaggggtgaatattgagctgnnnnnnnnnnnnnnnnnnnnnnnnnnnnnnnnnnnnnnnnnnnnnnnnnnnnnnnnnnnnnnnnnnnnnnnnnnnnnnnnnnnnnnnnnnnnnnnnnnnnnnnnnnnnnnnnnnnnnnnnnnnnnnnnnnnnnnnnnnnnnnnnnnnnnnnnnnnnnnnnnnnnnnnnnnnnnnnnnnnnnnnnnnnnnnnnnnnnnnnnnnnnnnnnnnnnnnnnnnnnnnnnnnnnnnnnnnnnnnnnnnnnnnnnnnnnnnnnnnnnnnnnnnnnnnnnnnnnnnnnnnnnnnnnnnnnnnnnnnnnnnnnnnnnnnnnnnnnnnnnnnnnnnnnnnnnnnnnnnnnnnnnnnnnnnnnnnnnnnnnnnnnnnnnnnnnnnnnnnnnnnnnnnnnnnnnnnnnnnnnnnnnnnnnnnnnnnnnnnnnnnnnnnnnnnnnnnnnnnnnnnnnnnnnnnnnnnnnnnnnnnnnnnnnnnnnnnnnnnnnnnnnnnnnnnnnnnnnnnnnnnnnnnnnnnnnnnnnnnnnnnnnnnnnnnnnnnnnnnnnnnnnnnnnnnnnnnnnnnnnnnnnnnnnnnnnnnnnnnnnnnnnnnnnnnnnnnnnnnnnnnnnnnnnnnnnnnnnnnnnnnnnnnnnnnnnnnnnnnnnnnnnnnnnnnnnnnnnnnnnnnnnnnnnnnnnnnnnnnnnnnnnnnnnnnnnnnnnnnnnnnnnnnnnnnnnnnnnnnnnnnnnnnnnnnnnnnnnnnnnnnnnnnnnnnnnnnnnnnnnnnnnnnnnnnnnnnnnnnnnnnnnnnnnnnnnnnnnnnnnnnnnnnnnnnnnnnnnnnnnnnnnnnnnnnnnnnnnnnnnnnnnnnnnnnnnnnnnnnnnnnnnnnnnnnnnnnnnnnnnnnnnnnnnnnnnnnnnnnnnnnnnnnnnnnnnnnnnnnnnnnnnnnnnnnnnnnnnnnnnnnnnnnnnnnnnnnnnnnnnnnnnnnnnnnnnnnnnnnnnnnnnnnnnnnnnnnnnnnn

SEQ ID NO: 4343 - DNA, 1576 bp, Xenorhabdus sp.
  unsure (1)..(1576): unsure at all n locations
nnnnnnnnnnnnnnnnnnnnnnnnnnnnnnnnnnnnnnnnnnnnnnnnnnntaaacactgttccttctctgntgcaactttggtttgtagggagnggaaaagtnnnnnnnnnnnnnnnnnnnnnnnnnnnnnnnnnnnnnnnnnnnnnnnnnnnnnnnnnnnnnnnnnnnnnnnnnnnnnnnnnnnnnnnnnnnnnnnnnnnnnnnnnnnnnnnnnnnnnnnnnnnnnnnnnnnnnnnnnnnnnnnnnnnnnnnnnnnnnnnnnnnnnnnnnnnnnnnnnnnnnnnnnnnnnnnnnnnnnnnnnnnnnnnnnnnnnnnnnnnnnnnnnnnnnnnnnnnnnnnnnnnnnnnnnnnnnnnnnnnnnnnnnnnnnnnnnnnnnnnnnnnnnnnnnnnnnnnnnnnnnnnnnnnnnnnnnnnnnnnnnnnnnnnnnnnnnnnnnnnnnnnnnnnnnnnnnnnnnnnnnnnnnnnnnnnnnnnnnnnnnnnnnnnnnnnnnnnnnnnnnnnnnnnnnnnnnnnnnnnnnnnnnnnnnnnnnnnnnnnnnnnnnnnnnnnnnnnnnnnnnnnnnnnnnnnnnnnnnnnnnnnnnnnnnnnnnnnnnnnnnnnnnnnnnnnnnnnnnnnnnnnnnnnnnnnnnnnnnnnnnnnnnnnnnnnnnnnnnnnnnnnnnnnnnnnnnnnnnnnnnnnnnnnnnnnnnnnnnnnnnnnnnnnnnnnnnnnnnnnnnnnnnnnnnnnnnnnnnnnnnnnnnnnnnnnnnnnnnnnnnnnnnnnnnnnnnnnnnnnnnnnnnnnnnnnnnnnnnnnnnnnnnnnnnnnnnnnnnnnnnnnnnnnnnnnnnnnnnnnnnnnnnnnnnnnnnnnnnnnnnnnnnnnnnnnnnnnnnnnnnnnnnnnnnnnnnnnnnnnnnnnnnnnnnnnnnnnnnnnnnnnnnnnnnnnnnnnnnnnnnnnnnnnnnnnnnnnnnnnnnnnnnnnnnnnnnnnnnnnnnnnnnnnnnnnnnnnnnnnnnnnnnnnnnnnnnnnnnnnnnnnnnnnnnnnnnnnnnnnnnnnnnnnnnnnnnnnnnnnnnnnnnnnnnnnnnnnnnnnnnnnnnnnnnnnnnnnnnnnnnnnnnnnnnnnnnnnnnnnnnnnnnnnnnnnnnnnnnnnnnnnnnnnnnnnnnnnnnnnnnnnnnnnnnnnnnnnnnnnnnnnnnnnnnnnnnnnnnnnnnnnnnnnnnnnnnnnnnnnnnnnnnnnnnnnnnnnnnnnnnnnnnnnnnnnnnnnnnnnnnnnnnnnnnnnnnnnnnnnnnnnnnnnnnnnnnnnnnnnnnnnnnnnnnnnnnnnnnnnnnnnnnnnnnnnnnnnnnnnnnnnnnnnnnnnnnnnnnnnnnnnnnnnnnnnnnnnnnnnnnnnnnnnnnnnnnnnnnnnnnnnnnnnnnnnnnnnnnnnnnnnnnnnnnnnnnnnnnnnnnnnnnnnnnnnnnnnnnnnnnnnnnnnnnnnnnnnnnnnnnnnnnnnnnnnnnnnnnnnnnnnnnnnnnnnnnnnnnnnnnnnnnnnnnnnnnnnnnnnnnnnnnnnnnnnnnnnnnnnnnnnnnnnnnnnnn

SEQ ID NO: 4344 - DNA, 1230 bp, Xenorhabdus sp.
  unsure (1)..(1230): unsure at all n locations
nnnnnnnnnnnnnnnnnnnnnnnnnnaatgtgctctaaagatatcaaacactgcgatttattcctcaagggctgatcttctttaagccttttattttttttcaaagcagccttactttaagacgaattgtgtggcatgaacaatgcgagtctgtcagaagctacacattgaattttattgatccttgggcgttgacaccatagactatataccacgttctagagataaacacttatactaggcgccnnnnnnnnnnnnnnnnnnnnnnnnnnnnnnnnnnnnnnnnnnnnnnnnnnnnnnnnnnnnnnnnnnnnnnnnnnnnnnnnnnnnnnnnnnnnnnnnnnnnnnnnnnnnnnnnnnnnnnnnnnnnnnnnnnnnnnnnnnnnnnnnnnnnnnnnnnnnnnnnnnnnnnnnnnnnnnnnnnnnnnnnnnnnnnnnnnnnnnnnnnnnnnnnnnnnnnnnnnnnnnnnnnnnnnnnnnnnnnnnnnnnnnnnnnnnnnnnnnnnnnnnnnnnnnnnnnnnnnnnnnnnnnnnnnnnnnnnnnnnnnnnnnnnnnnnnnnnnnnnnnnnnnnnnnnnnnnnnnnnnnnnnnnnnnnnnnnnnnnnnnnnnnnnnnnnnnnnnnnnnnnnnnnnnnnnnnnnnnnnnnnnnnnnnnnnnnnnnnnnnnnnnnnnnnnnnnnnnnnnnnnnnnnnnnnnnnnnnnnnnnnnnnnnnnnnnnnnnnnnnnnnnnnnnnnnnnnnnnnnnnnnnnnnnnnnnnnnnnnnnnnnnnnnnnnnnnnnnnnnnnnnnnnnnnnnnnnnnnnnnnnnnnnnnnnnnnnnnnnnnnnnnnnnnnnnnnnnnnnnnnnnnnnnnnnnnnnnnnnnnnnnnnnnnnnnnnnnnnnnnnnnnnnnnnnnnnnnnnnnnnnnnnnnnnnnnnnnnnnnnnnnnnnnnnnnnnnnnnnnnnnnnnnnnnnnnnnnnnnnnnnnnnnnnnnnnnnnnnnnnnnnnnnnnnnnnnnnnnnnnnnnnnnnnnnnnnnnnnnnnnnnnnnnnnnnnnnnnnnnnnnnnnnnnnnnnnnnnnnnnnnnnnnnnnnnnnnnnnnnnnnnnnnnnnnnnnnnnnnnnnnnnnnnnnnnnnnnnnnnnnnnnnnnnnnnnnnnnnnnnnnnnnnnnnnnnnnnnnnnnnnnnnnnnnnnnnnnnnnnnnnnnnnnnnnnnnnnnnnnnnnnnnnnnnnnnnnnnnnnnnnn

SEQ ID NO: 4345 - DNA, 983 bp, Xenorhabdus sp.
  unsure (1)..(983): unsure at all n locations
nnnnnnnnnnnnnnnnnnnnnnnnnnnnnnnnnnnnnnnnnnnnnnntgtgctctaaagagtgcgccgctggctcgcgttgtattgcattatatataccggtgcttggaaatgactacatgctgcgaaacgccgctcatggagggctgcatcgtcgggccaataagaaacacctggacccccatcaccaccagccagtcatgaaccaggacgccggttctagccgagagcaacaggaactggccggcgtttatcttttatagctggggactgggggagctacacaccatttatatggccgatgtgatcatcagcacccacccgatgccgttgggaataacctctccaagtatgatgcagcgattgggctaagacatggnnnnnnnnnnnnnnnnnnnnnnnnnnnnnnnnnnnnnnnnnnnnnnnnnnnnnnnnnnnnnnnnnnnnnnnnnnnnnnnnnnnnnnnnnnnnnnnnnnnnnnnnnnnnnnnnnnnnnnnnnnnnnnnnnnnnnnnnnnnnnnnnnnnnnnnnnnnnnnnnnnnnnnnnnnnnnnnnnnnnnnnnnnnnnnnnnnnnnnnnnnnnnnnnnnnnnnnnnnnnnnnnnnnnnnnnnnnnnnnnnnnnnnnnnnnnnnnnnnnnnnnnnnnnnnnnnnnnnnnnnnnnnnnnnnnnnnnnnnnnnnnnnnnnnnnnnnnnnnnnnnnnnnnnnnnnnnnnnnnnnnnnnnnnnnnnnnnnnnnnnnnnnnnnnnnnnnnnnnnnnnnnnnnnnnnnnnnnnnnnnnnnnnnnnnnnnnnnnnnnnnnnnnnnnnnnnnnnnnnnnnnnnnnnnnnnnnnnnnnnnnnnnnnnnnnnnnnnnnnnnnnnnnnnnnnnnnnnnnnnnnnnnnnnnnnnnnnnnnnnnnnnnnnnnnnnnnnnnnnnnnnnnnnnnnnnnnnnnnnnnnnnnnnnnnnnnnnnnnnnnnnnnnnnnnnnnnnnnnnnnnnnn

SEQ ID NO: 4346 - DNA, 800 bp, Xenorhabdus sp.
  unsure (1)..(800): unsure at all n locations
nnnnnnnnnnnnnnnnnnnnnnnnnnnnnnnnnnnnnnagacgattaatacagataccctctccgataacatcaacaggggcaaaatcgctttcacactgtattaatctgaggttacattgcannnnnnnnnnnnnnnnnnnnnnnnnnnnnnnnnnnnnnnnnnnnnnnnnnnnnnnnnnnnnnnnnnnnnnnnnnnnnnnnnnnnnnnnnnnnnnnnnnnnnnnnnnnnnnnnnnnnnnnnnnnnnnnnnnnnnnnnnnnnnnnnnnnnnnnnnnnnnnnnnnnnnnnnnnnnnnnnnnnnnnnnnnnnnnnnnnnnnnnnnnnnnnnnnnnnnnnnnnnnnnnnnnnnnnnnnnnnnnnnnnnnnnnnnnnnnnnnnnnnnnnnnnnnnnnnnnnnnnnnnnnnnnnnnnnnnnnnnnnnnnnnnnnnnnnnnnnnnnnnnnnnnnnnnnnnnnnnnnnnnnnnnnnnnnnnnnnnnnnnnnnnnnnnnnnnnnnnnnnnnnnnnnnnnnnnnnnnnnnnnnnnnnnnnnnnnnnnnnnnnnnnnnnnnnnnnnnnnnnnnnnnnnnnnnnnnnnnnnnnnnnnnnnnnnnnnnnnnnnnnnnnnnnnnnnnnnnnnnnnnnnnnnnnnnnnnnnnnnnnnnnnnnnnnnnnnnnnnnnnnnnnnnnnnnnnnnnnnnnnnnnnnnnnnnnnnnnnnnnnnnnnnnnnnnnnnnnnnnnnnnnnnnnnnnnnnnnnnnnnnnnnnnnnnnnnnnnnnnnnnnnnnnnnnnnnnnnnnnnnnnnnnnnnnnnnnnnnn

SEQ ID NO: 4347 - DNA, 903 bp, Xenorhabdus sp.
  unsure (1)..(903): unsure at all n locations
nnnnnnnnnnnnnnnnnnnnnnnnnnnnnnnnnnnctggtctgtagaccgttcgcacatacttcgtgccgcagcaccatcatcgcgatgctcgatccgttcgaggacgcgggcgtgatggtgacgccctccttcacgacggtggtgatgcccgtattcgacagggcattgccgagattgataccgggacgggcaacaaaatctcgaaggaggtaatgaacagaggaaaagccagtctgcggcgttgggatgagcaggccgaggccaacgacaacgcgcagcggtgtccatatgatatgccaccgttcgccgagtgcctgtccggtgcgggccgaggcgacgatgccctgtaacgactggaaggcgaaaaagagtccgccgagaaaaaacaggaccgaattgaaaacctggaggacgcggccgtacattgtcttcgcctcgctcgggagcaccgcgttgacaatttgccatgcgatatcggtggacggggggatcaccccgcagatcaatcatttggaaannnnnnnnnnnnnnnnnnnnnnnnnnnnnnnnnnnnnnnnnnnnnnnnnnnnnnnnnnnnnnnnnnnnnnnnnnnnnnnnnnnnnnnnnnnnnnnnnnnnnnnnnnnnnnnnnnnnnnnnnnnnnnnnnnnnnnnnnnnnnnnnnnnnnnnnnnnnnnnnnnnnnnnnnnnnnnnnnnnnnnnnnnnnnnnnnnnnnnnnnnnnnnnnnnnnnnnnnnnnnnnnnnnnnnnnnnnnnnnnnnnnnnnnnnnnnnnnnnnnnnnnnnnnnnnnnnnnnnnnnnnnnnnnnnnnnnnnnnnnnnnnnnnnnnnnnnnnnnnnnnnnnnnnnnnnnnnnnnnnnnnnnnnnnnnnnnnnnnnnnnnnnnnnnnnnnnnnnnnnnnnn

SEQ ID NO: 4348 - DNA, 922 bp, Xenorhabdus sp.
  unsure (1)..(922): unsure at all n locations
nnnnnnnnnnnnnnnnnnnnnnnnnnntgtgctctaaaggagttttacccaggacaagtcaccacgaaacggcggtttcgagcatatgaccgaccgcgatttcctcgatcgtgttcaactcgtcgctagcttcacccaggggatcgacttcgatttcgaggaggccatggatgcgtagtcccatttacttcatgcttatccgccttgatgatggcgatctggcgtccctgacgatcatccgcaaaccgacacaatttttcgcgcaattgcgctcctatcgcttcaccgaacatgcgggcgcgtcgtctccggcactggccgaaatggaaacgggcgcatttctggacaccgtggcgggtatcaccagcgtctcttgtgatcggccattcacctacatcgttcccgacgggatcggccgcgccgaatggctggcggcaatggnnnnnnnnnnnnnnnnnnnnnnnnnnnnnnnnnnnnnnnnnnnnnnnnnnnnnnnnnnnnnnnnnnnnnnnnnnnnnnnnnnnnnnnnnnnnnnnnnnnnnnnnnnnnnnnnnnnnnnnnnnnnnnnnnnnnnnnnnnnnnnnnnnnnnnnnnnnnnnnnnnnnnnnnnnnnnnnnnnnnnnnnnnnnnnnnnnnnnnnnnnnnnnnnnnnnnnnnnnnnnnnnnnnnnnnnnnnnnnnnnnnnnnnnnnnnnnnnnnnnnnnnnnnnnnnnnnnnnnnnnnnnnnnnnnnnnnnnnnnnnnnnnnnnnnnnnnnnnnnnnnnnnnnnnnnnnnnnnnnnnnnnnnnnnnnnnnnnnnnnnnnnnnnnnnnnnnnnnnnnnnnnnnnnnnnnnnnnnnnnnnnnnnnnnnnnnnnnnnnnnnnnnnnnnnnnnnnnnnnnnnnnnnnnnnnnnnnnnnnnnnnnnnnnnnnnnnnnnnnnn

SEQ ID NO: 4349 - DNA, 603 bp, Xenorhabdus sp.
  unsure (1)..(603): unsure at all n locations
nnnnnnnnnnnnnnnnnnnnnnnnnnnnnnnnnnnnnnnnnnnnnnnnnnnnnnnnnnnnnnnnnnnnnnnnnnnnnnnnnnnnnnnnnnnnnnnnnnnnnnnnnnnnnnnnnnnnnnnnnnnnnnnnnnnnnnnnnnnnnnnnnnnnnnnnnnnnnnnnnnnnntgatagtcctttccttaatccatgggagcaacatcaattgacgggccggggannnnnnnnnnnnnnnnnnnnnnnnnnnnnnnnnnnnnnnnnnnnnnnnnnnnnnnnnnnnnnnnnnnnnnnnnnnnnnnnnnnnnnnnnnnnnnnnnnnnnnnnnnnnnnnnnnnnnnnnnnnnnnnnnnnnnnnnnnnnnnnnnnnnnnnnnnnnnnnnnnnnnnnnnnnnnnnnnnnnnnnnnnnnnnnnnnnnnnnnnnnnnnnnnnnnnnnnnnnnnnnnnnnnnnnnnnnnnnnnnnnnnnnnnnnnnnnnnnnnnnnnnnnnnnnnnnnnnnnnnnnnnnnnnnnnnnnnnnnnnnnnnnnnnnnnnnnnnnnnnnnnnnnnnnnnnnnnnnnnnnnnnnnnnnnnnnnnnnnnnnnnnnnnnnnnnnnnnnnnnnnnnn

SEQ ID NO: 4350 - DNA, 857 bp, Xenorhabdus sp.
  unsure (1)..(857): unsure at all n locations
nnnnnnnnnnnnnnnnnnnnnnnnnnnnntgtgctctaaagggagctgagggtttgagccttgaagtgaaaagaggggaaattcgtggccttcttggggcataaagcgaatggttaggggcctggttctttttggggcctgggattttcccccgtattagcggggccattaacaattgccaagcttacattannnnnnnnnnnnnnnnnnnnnnnnnnnnnnnnnnnnnnnnnnnnnnnnnnnnnnnnnnnnnnnnnnnnnnnnnnnnnnnnnnnnnnnnnnnnnnnnnnnnnnnnnnnnnnnnnnnnnnnnnnnnnnnnnnnnnnnnnnnnnnnnnnnnnnnnnnnnnnnnnnnnnnnnnnnnnnnnnnnnnnnnnnnnnnnnnnnnnnnnnnnnnnnnnnnnnnnnnnnnnnnnnnnnnnnnnnnnnnnnnnnnnnnnnnnnnnnnnnnnnnnnnnnnnnnnnnnnnnnnnnnnnnnnnnnnnnnnnnnnnnnnnnnnnnnnnnnnnnnnnnnnnnnnnnnnnnnnnnnnnnnnnnnnnnnnnnnnnnnnnnnnnnnnnnnnnnnnnnnnnnnnnnnnnnnnnnnnnnnnnnnnnnnnnnnnnnnnnnnnnnnnnnnnnnnnnnnnnnnnnnnnnnnnnnnnnnnnnnnnnnnnnnnnnnnnnnnnnnnnnnnnnnnnnnnnnnnnnnnnnnnnnnnnnnnnnnnnnnnnnnnnnnnnnnnnnnnnnnnnnnnnnnnnnnnnnnnnnnnnnnnnnnnnnnnnnnnnnnnnnnnnnnnnnnnnnnnnnnnnnnnnnnnnnnnnnnnnnnnnnnnnnnnnnnnnnnnnnnnnnnnnnnnnnnnnnnnnnnnnnnnnn

SEQ ID NO: 4351 - DNA, 912 bp, Xenorhabdus sp.
  unsure (1)..(912): unsure at all n locations
nnnnnnnnnnnnnnnnnnnnnnnnnnnnnnnnnnnnnnnctaaagagatctcctaggggtcctttaaacccataaatctgggggtgcgtgggatccaaaaaagttaatannnnnnnnnnnnnnnnnnnnnnnnnnnnnnnnnnnnnnnnnnnnnnnnnnnnnnnnnnnnnnnnnnnnnnnnnnnnnnnnnnnnnnnnnnnnnnnnnnnnnnnnnnnnnnnnnnnnnnnnnnnnnnnnnnnnnnnnnnnnnnnnnnnnnnnnnnnnnnnnnnnnnnnnnnnnnnnnnnnnnnnnnnnnnnnnnnnnnnnnnnnnnnnnnnnnnnnnnnnnnnnnnnnnnnnnnnnnnnnnnnnnnnnnnnnnnnnnnnnnnnnnnnnnnnnnnnnnnnnnnnnnnnnnnnnnnnnnnnnnnnnnnnnnnnnnnnnnnnnnnnnnnnnnnnnnnnnnnnnnnnnnnnnnnnnnnnnnnnnnnnnnnnnnnnnnnnnnnnnnnnnnnnnnnnnnnnnnnnnnnnnnnnnnnnnnnnnnnnnnnnnnnnnnnnnnnnnnnnnnnnnnnnnnnnnnnnnnnnnnnnnnnnnnnnnnnnnnnnnnnnnnnnnnnnnnnnnnnnnnnnnnnnnnnnnnnnnnnnnnnnnnnnnnnnnnnnnnnnnnnnnnnnnnnnnnnnnnnnnnnnnnnnnnnnnnnnnnnnnnnnnnnnnnnnnnnnnnnnnnnnnnnnnnnnnnnnnnnnnnnnnnnnnnnnnnnnnnnnnnnnnnnnnnnnnnnnnnnnnnnnnnnnnnnnnnnnnnnnnnnnnnnnnnnnnnnnnnnnnnnnnnnnnnnnnnnnnnnnnnnnnnnnnnnnnnnnnnnnnnnnnnnnnnnnnnnnnnnnnnnnnnnnnnnnnnnnnnnnnnnnnnnnnnnnnnnnnnnnnnnnn

SEQ ID NO: 4352 - DNA, 1199 bp, Xenorhabdus sp.
  unsure (1)..(1199): unsure at all n locations
nnnnnnnnnnnnnnnnnnnnnnnnnnnnnnnnnnnnnnnnnnnnnnnnnnnnnnnnnnnnnnnnnnnnnnnnnnnnnnnnnnnnnnnnnnnnnnnnnnnnnnnnnnnnnnnnnnnnnnnnnnnnnnnnnnnnnnnnnnnnnnnnnnnnnnnnnnnnnnnnnnnnnnnnnnnnnnnnnnnnnnnnnnnnnnnnnnnnnnnnnnnnnnnnnnagaaaggaaggggaggcgggagacaagccaagagggcagagccagacgcagaaggcgaaccaagaagggagacaagaagaaccagcagggacagcggaaaaagccgggggacacaaaagacacagagaaaaacccccagagaaaaggacagggaagcaaaacagcagaaaacacggaggagaacccggccaaagagggaaaaagaaaagcgcgagaagggccagggagaaaacaccggnnnnnnnnnnnnnnnnnnnnnnnnnnnnnnnnnnnnnnnnnnnnnnnnnnnnnnnnnnnnnnnnnnnnnnnnnnnnnnnnnnnnnnnnnnnnnnnnnnnnnnnnnnnnnnnnnnnnnnnnnnnnnnnnnnnnnnnnnnnnnnnnnnnnnnnnnnnnnnnnnnnnnnnnnnnnnnnnnnnnnnnnnnnnnnnnnnnnnnnnnnnnnnnnnnnnnnnnnnnnnnnnnnnnnnnnnnnnnnnnnnnnnnnnnnnnnnnnnnnnnnnnnnnnnnnnnnnnnnnnnnnnnnnnnnnnnnnnnnnnnnnnnnnnnnnnnnnnnnnnnnnnnnnnnnnnnnnnnnnnnnnnnnnnnnnnnnnnnnnnnnnnnnnnnnnnnnnnnnnnnnnnnnnnnnnnnnnnnnnnnnnnnnnnnnnnnnnnnnnnnnnnnnnnnnnnnnnnnnnnnnnnnnnnnnnnnnnnnnnnnnnnnnnnnnnnnnnnnnnnnnnnnnnnnnnnnnnnnnnnnnnnnnnnnnnnnnnnnnnnnnnnnnnnnnnnnnnnnnnnnnnnnnnnnnnnnnnnnnnnnnnnnnnnnnnnnnnnnnnnnnnnnnnnnnnnnnnnnnnnnnnnnnnnnnnnnnnnnnnnnnnnnnnnnnnnnnnnnnnnnnnnnnnnnnnnnnnnnnnnnnnnnnnnnnnnnnnnnnnnnnnnnnnnnnnnnnnnnnnnnnnnnnnnnnnnnnnnnnnnnnnnnnnnnnnnnnnnnnnnnnnnnnnnnnn

SEQ ID NO: 4353 - DNA, 1088 bp, Xenorhabdus sp.
  unsure (1)..(1088): unsure at all n locations
nnnnnnnnnnnnnnnnnnnnnnnnnnngctctaaacatctatcttccgacatgccccaccgccaatgctctgtgccaaactttacatcatgtgtacttctgtgcgcgcaaattgctcgttacagaccgggcgcgccaggacatgatggatagctatcatcttgtacattgatcgatgaacacgcttaatgcctatatgggcaattaaccccactaactgttacgaagttgccataaggcctgttccaaaagcgaaagtttgcctaaaaacatctgaccacttttgggtnnnnnnnnnnnnnnnnnnnnnnnnnnnnnnnnnnnnnnnnnnnnnnnnnnnnnnnnnnnnnnnnnnnnnnnnnnnnnnnnnnnnnnnnnnnnnnnnnnnnnnnnnnnnnnnnnnnnnnnnnnnnnnnnnnnnnnnnnnnnnnnnnnnnnnnnnnnnnnnnnnnnnnnnnnnnnnnnnnnnnnnnnnnnnnnnnnnnnnnnnnnnnnnnnnnnnnnnnnnnnnnnnnnnnnnnnnnnnnnnnnnnnnnnnnnnnnnnnnnnnnnnnnnnnnnnnnnnnnnnnnnnnnnnnnnnnnnnnnnnnnnnnnnnnnnnnnnnnnnnnnnnnnnnnnnnnnnnnnnnnnnnnnnnnnnnnnnnnnnnnnnnnnnnnnnnnnnnnnnnnnnnnnnnnnnnnnnnnnnnnnnnnnnnnnnnnnnnnnnnnnnnnnnnnnnnnnnnnnnnnnnnnnnnnnnnnnnnnnnnnnnnnnnnnnnnnnnnnnnnnnnnnnnnnnnnnnnnnnnnnnnnnnnnnnnnnnnnnnnnnnnnnnnnnnnnnnnnnnnnnnnnnnnnnnnnnnnnnnnnnnnnnnnnnnnnnnnnnnnnnnnnnnnnnnnnnnnnnnnnnnnnnnnnnnnnnnnnnnnnnnnnnnnnnnnnnnnnnnnnnnnnnnnnnnnnnnnnnnnnnnnnnnnnnnnnnnnnnnnnnnnnnnnnnnnnnnnnnnnnnnnnnnnnnnnnnnnnnnnnnnnnnnnnnnnnnnnnnnnnnnnnnnnnnnnnnnnnnnnnnnnnnnnnnnnnnnnnnnnnnnnnnnnnnnnnnnnnnnnn

SEQ ID NO: 4354 - DNA, 1034 bp, Xenorhabdus sp.
  unsure (1)..(1034): unsure at all n locations
nnnnnnnnnnnnnnnnnnnnnnnnnnnnnnnnnnnnnntaaacataggccttctggtgacaggcacagccgataaaacggtcgccgcgaaaatgggcttcgttaaaatcgagaccctggatctgcgtgcccatggcgccgtcgagaatgaggatgcgttcactcgcggcgtcgcgcaacgccttgaaaattttcgcgccgtcgcgctttgccccttcagggccaaacagatcgtcaaacacgggcacactcctcatttcgatttgcaagatcgcaagccgtcaagtcacataaagatatgtttatgtcaatatatcttcaagggacaggcatggctttgtgtcattgcggcaggttacgaaatttcactgacagatgacaggtttatacggcaaggatataagccgaagcagcaaaccgcatggaggacgagaatgcccgaggacgatcacaacagccgcaactggaacgccctgccctggcaccggcaatggctggtaaaacaggccgagggacttttcgatttctttcagtattgggcccttaaccctggcggcgnnnnnnnnnnnnnnnnnnnnnnnnnnnnnnnnnnnnnnnnnnnnnnnnnnnnnnnnnnnnnnnnnnnnnnnnnnnnnnnnnnnnnnnnnnnnnnnnnnnnnnnnnnnnnnnnnnnnnnnnnnnnnnnnnnnnnnnnnnnnnnnnnnnnnnnnnnnnnnnnnnnnnnnnnnnnnnnnnnnnnnnnnnnnnnnnnnnnnnnnnnnnnnnnnnnnnnnnnnnnnnnnnnnnnnnnnnnnnnnnnnnnnnnnnnnnnnnnnnnnnnnnnnnnnnnnnnnnnnnnnnnnnnnnnnnnnnnnnnnnnnnnnnnnnnnnnnnnnnnnnnnnnnnnnnnnnnnnnnnnnnnnnnnnnnnnnnnnnnnnnnnnnnnnnnnnnnnnnnnnnnnnnnnnnnnnnnnnnnnnnnnnnnnnnnnnnnnnnnnnnnnnnnnnnnnnnnnnnnnnnnnnnnnnnnnnnnnnnnnnnnnnnnnnnnnnnnnnn

SEQ ID NO: 4355 - DNA, 750 bp, Xenorhabdus sp.
  unsure (1)..(750): unsure at all n locations
nnnnnnnnnnnnnnnnnnnnnnnnnnnnnnnnnnnnnnnnnnnnnnnnnnnnnnnnnnnnnnnnnnnnnnnnnnnnnnnnnnnnnnnnnnnnnnnnnnnnnnnnnnnnnnnnnnnnnnnnnnnnaaaaaaaaaagagaaaaaaaaaaaaaaaaaaaaaaaaaaaaaaaaaaaaaaaaaaaaaaaaaaaagaaaaaaagaaaaaaaaaagaaaaaaagaaaaaagggaaaaaaaaaaaaaaaaaaaagaaaaaaaaaaaaaaaaaaaaagaaaaaaaaaaaaaaaaaaaaaaaaaaaaaaaaaaaaaaaaaaaaaaaaagaagaaaaaaaaaaaaaaaaaaaaaggaaaagaaaaaaaaaaaaaaaaaaaaaagaaaaaaaagaaaaaaaaaaaaaaaagagaaagaaaagaaaaaaaaaaaaaaaagaaagaaaaaaaaaaaaagaaaaaaaaaaagaagagaaaatgaaagaaaaaaaaaaggaaaagaaaaaagaaaaaaaaaataagaaaaaaaaaaaaaaaagaaaaagaaaaattaaagaaaaaaaaaaaaaaaaaagaaaaaagaaaaaaaaaaaaagagaaaaaaaaaaaaaaaagagaaaaaagagaaggaaaagaaaaaaaaagaaaaaaaaaagatagaaaaaaaaaaaaagaaaaaagaaaaaaaagaaagagaaaaagaagaaaaaaaaagagataaaaaaaaaaaagagaagaagaagataaaaaaaaannnnnnnn

SEQ ID NO: 4356 - DNA, 1145 bp, Xenorhabdus sp.
  unsure (1)..(1145): unsure at all n locations
nnnnnnnnnnnnnnnnnnnnnnnnnnnnnnnnnnnnnnnnnnnnnnnnnnnnnnnnnnnnntatgtactcattaatgaagtgaactcgtacctcatttccccaatatcaaccccaaccggtgtgttttttttccaaaaaaatgaggccccccccctaaaaatnnnnnnnnnnnnnnnnnnnnnnnnnnnnnnnnnnnnnnnnnnnnnnnnnnnnnnnnnnnnnnnnnnnnnnnnnnnnnnnnnnnnnnnnnnnnnnnnnnnnnnnnnnnnnnnnnnnnnnnnnnnnnnnnnnnnnnnnnnnnnnnnnnnnnnnnnnnnnnnnnnnnnnnnnnnnnnnnnnnnnnnnnnnnnnnnnnnnnnnnnnnnnnnnnnnnnnnnnnnnnnnnnnnnnnnnnnnnnnnnnnnnnnnnnnnnnnnnnnnnnnnnnnnnnnnnnnnnnnnnnnnnnnnnnnnnnnnnnnnnnnnnnnnnnnnnnnnnnnnnnnnnnnnnnnnnnnnnnnnnnnnnnnnnnnnnnnnnnnnnnnnnnnnnnnnnnnnnnnnnnnnnnnnnnnnnnnnnnnnnnnnnnnnnnnnnnnnnnnnnnnnnnnnnnnnnnnnnnnnnnnnnnnnnnnnnnnnnnnnnnnnnnnnnnnnnnnnnnnnnnnnnnnnnnnnnnnnnnnnnnnnnnnnnnnnnnnnnnnnnnnnnnnnnnnnnnnnnnnnnnnnnnnnnnnnnnnnnnnnnnnnnnnnnnnnnnnnnnnnnnnnnnnnnnnnnnnnnnnnnnnnnnnnnnnnnnnnnnnnnnnnnnnnnnnnnnnnnnnnnnnnnnnnnnnnnnnnnnnnnnnnnnnnnnnnnnnnnnnnnnnnnnnnnnnnnnnnnnnnnnnnnnnnnnnnnnnnnnnnnnnnnnnnnnnnnnnnnnnnnnnnnnnnnnnnnnnnnnnnnnnnnnnnnnnnnnnnnnnnnnnnnnnnnnnnnnnnnnnnnnnnnnnnnnnnnnnnnnnnnnnnnnnnnnnnnnnnnnnnnnnnnnnnnnnnnnnnnnnnnnnnnnnnnnnnnnnnnnnnnnnnnnnnnnnnnnnnnnnnnnnnnnnnnnnnnnnnnnnnnnnnnnnnnnnnnnnnnnnnnnnnnnnnnnnnnnnnnnnnnnnnnnnnnnnnnnnnnnnnnnnn

SEQ ID NO: 4357 - DNA, 777 bp, Xenorhabdus sp.
  unsure (1)..(777): unsure at all n locations
nnnnnnnnnnnnnnnnnnnnnnnnnnnnnnnnnnnnnngtgctctaaagaccgtggcctgggtcgtaaagaatattcgggaggtgcctgaggttcctttcacccaagtactccgcgttagagccaaccccacaccgcaattgtacccatcttattacccgttgttgagatgcgtctaatatcctgtacagcaacgctagttagtcacaagggagcttcgcnnnnnnnnnnnnnnnnnnnnnnnnnnnnnnnnnnnnnnnnnnnnnnnnnnnnnnnnnnnnnnnnnnnnnnnnnnnnnnnnnnnnnnnnnnnnnnnnnnnnnnnnnnnnnnnnnnnnnnnnnnnnnnnnnnnnnnnnnnnnnnnnnnnnnnnnnnnnnnnnnnnnnnnnnnnnnnnnnnnnnnnnnnnnnnnnnnnnnnnnnnnnnnnnnnnnnnnnnnnnnnnnnnnnnnnnnnnnnnnnnnnnnnnnnnnnnnnnnnnnnnnnnnnnnnnnnnnnnnnnnnnnnnnnnnnnnnnnnnnnnnnnnnnnnnnnnnnnnnnnnnnnnnnnnnnnnnnnnnnnnnnnnnnnnnnnnnnnnnnnnnnnnnnnnnnnnnnnnnnnnnnnnnnnnnnnnnnnnnnnnnnnnnnnnnnnnnnnnnnnnnnnnnnnnnnnnnnnnnnnnnnnnnnnnnnnnnnnnnnnnnnnnnnnnnnnnnnnnnnnnnnnnnnnnnnnnnnnnnnnnnnnnnnnnnnnnnnnnnnnnnnnnnnnnnnnnnnnnnnnnnnnnnnnnnnnnnnnn

SEQ ID NO: 4358 - DNA, 890 bp, Xenorhabdus sp.
  unsure (1)..(890): unsure at all n locations
nnnnnnnnnnnnnnnnnnnnnnnnnnaggcaacggtgacatcgccgtgcatgccggcgtcgtaatgtccgggcacaaggcaggcgaccttgaagacgccgtcattggtgaacctccagacgattgcccccgtcttgccgggtgccagacggatggcgttcggatcggcatgttccatctcggggaatttctccatcagcgccttgtgctccatgaccttcgcttcttcatcgagaacgaattcatgatcgagctcgccttcgttcttgacggtgaagcggatggtctggtccttgcggaccttgaagttgttgggcgtgaagatcatcttgccatccagcgtctctttcatgctgacgcagatgatctgggtgactttcgtggcgtcgcccggttcgccgacagccatgacctcgctgtgtccgccagcatggctnnnnnnnnnnnnnnnnnnnnnnnnnnnnnnnnnnnnnnnnnnnnnnnnnnnnnnnnnnnnnnnnnnnnnnnnnnnnnnnnnnnnnnnnnnnnnnnnnnnnnnnnnnnnnnnnnnnnnnnnnnnnnnnnnnnnnnnnnnnnnnnnnnnnnnnnnnnnnnnnnnnnnnnnnnnnnnnnnnnnnnnnnnnnnnnnnnnnnnnnnnnnnnnnnnnnnnnnnnnnnnnnnnnnnnnnnnnnnnnnnnnnnnnnnnnnnnnnnnnnnnnnnnnnnnnnnnnnnnnnnnnnnnnnnnnnnnnnnnnnnnnnnnnnnnnnnnnnnnnnnnnnnnnnnnnnnnnnnnnnnnnnnnnnnnnnnnnnnnnnnnnnnnnnnnnnnnnnnnnnnnnnnnnnnnnnnnnnnnnnnnnnnnnnnnnnnnnnnnnnnnnnnnnnnnnnnnnnnnnnnnnnnnnnnnnnnnn

SEQ ID NO: 4359 - DNA, 933 bp, Xenorhabdus sp.
  unsure (1)..(933): unsure at all n locations
nnnnnnnnnnnnnnnnnnnnnnnnnnnnnnnnnntgtgctctaaaggtctttccgaccttttccgtcagcctgaacggcatcggaacgcccgggcttggcatgtatcgcgtgcttgaaggggccgtcaccgccaatattctcgctttggcgacctatgacaagaatatcaggctggcggatacgcgcttccgtcaggcacaggtcaacgcggcgatcgccaccgtatcgcttgccgcggaaacccgccgggcatggataaacgccgtggccgcctgggaaaacgtcgcctatctcaatcaggcgaaggtcgcggccgacgcctcttcggaacttgcgaaaaagatcggcgaagcgggttcgatgcccaaggccaatcaggcccgcgagcatgtgttttatgcggaactgacgggagaaacggcaaaggcgcgactggcggcaaaactcgccaaggaagagctgatccggctgatgggcctttccggcacggacgccgagttccagatacccaaccggcttccttccctgccgaagaccctgatagcgcgcaacgatatcgnnnnnnnnnnnnnnnnnnnnnnnnnnnnnnnnnnnnnnnnnnnnnnnnnnnnnnnnnnnnnnnnnnnnnnnnnnnnnnnnnnnnnnnnnnnnnnnnnnnnnnnnnnnnnnnnnnnnnnnnnnnnnnnnnnnnnnnnnnnnnnnnnnnnnnnnnnnnnnnnnnnnnnnnnnnnnnnnnnnnnnnnnnnnnnnnnnnnnnnnnnnnnnnnnnnnnnnnnnnnnnnnnnnnnnnnnnnnnnnnnnnnnnnnnnnnnnnnnnnnnnnnnnnnnnnnnnnnnnnnnnnnnnnnnnnnnnnnnnnnnnnnnnnnnnnnnnnnnnnnnnnnnnnnnnnnnnnnnnnnnnnnnnnnnnnnnnnnnnnnnnnnnnnnnnnnn

SEQ ID NO: 4360 - DNA, 855 bp, Xenorhabdus sp.
  unsure (1)..(855): unsure at all n locations
nnnnnnnnnnnnnnnnnnnnnnnnnnnnnnnnnnnngtttggtaaaaaaagnccaatatcttcaagcagtgctgacatatgctcaccctttttttccactatagccagcataaaccccnnnnnnnnnnnnnnnnnnnnnnnnnnnnnnnnnnnnnnnnnnnnnnnnnnnnnnnnnnnnnnnnnnnnnnnnnnnnnnnnnnnnnnnnnnnnnnnnnnnnnnnnnnnnnnnnnnnnnnnnnnnnnnnnnnnnnnnnnnnnnnnnnnnnnnnnnnnnnnnnnnnnnnnnnnnnnnnnnnnnnnnnnnnnnnnnnnnnnnnnnnnnnnnnnnnnnnnnnnnnnnnnnnnnnnnnnnnnnnnnnnnnnnnnnnnnnnnnnnnnnnnnnnnnnnnnnnnnnnnnnnnnnnnnnnnnnnnnnnnnnnnnnnnnnnnnnnnnnnnnnnnnnnnnnnnnnnnnnnnnnnnnnnnnnnnnnnnnnnnnnnnnnnnnnnnnnnnnnnnnnnnnnnnnnnnnnnnnnnnnnnnnnnnnnnnnnnnnnnnnnnnnnnnnnnnnnnnnnnnnnnnnnnnnnnnnnnnnnnnnnnnnnnnnnnnnnnnnnnnnnnnnnnnnnnnnnnnnnnnnnnnnnnnnnnnnnnnnnnnnnnnnnnnnnnnnnnnnnnnnnnnnnnnnnnnnnnnnnnnnnnnnnnnnnnnnnnnnnnnnnnnnnnnnnnnnnnnnnnnnnnnnnnnnnnnnnnnnnnnnnnnnnnnnnnnnnnnnnnnnnnnnnnnnnnnnnnnnnnnnnnnnnnnnnnnnnnnnnnnnnnnnnnnnnnnnnnnnnnnnnnnnnnnnnnnnnnnnnnnnnnnnnnnnnnnnnnnnn

SEQ ID NO: 4361 - DNA, 943 bp, Xenorhabdus sp.
  unsure (1)..(943): unsure at all n locations
nnnnnnnnnnnnnnnnnnnnnnnnnnnntgccgcgtttctggaatataagcgccacccgcgccggggaccaaaacccggttttggcgtgtcgcgaaaagcgcggtcatttcgggcgaaccttcatagaggctaatgaaacttcccgccagcaggcgcaacgcggcagcgaaggatgccttttgagccagcgcgtcgatttcgccgagtggcggtcggctgcatcgggtggtggcgtccggcagccgcgaaatcgcaaaatcgaaaaaattggtcatagtgcgcgctcctgaagctgccggacccgtttccctttgaaggtgcatggaactgatcgatccatgggccttacaagggcgatggcgaggcgtcttctcattgcgcgcagaggcgaaattttaaaccgcgggcgcgcccatggcgcggatgtcgccgggcgtcnnnnnnnnnnnnnnnnnnnnnnnnnnnnnnnnnnnnnnnnnnnnnnnnnnnnnnnnnnnnnnnnnnnnnnnnnnnnnnnnnnnnnnnnnnnnnnnnnnnnnnnnnnnnnnnnnnnnnnnnnnnnnnnnnnnnnnnnnnnnnnnnnnnnnnnnnnnnnnnnnnnnnnnnnnnnnnnnnnnnnnnnnnnnnnnnnnnnnnnnnnnnnnnnnnnnnnnnnnnnnnnnnnnnnnnnnnnnnnnnnnnnnnnnnnnnnnnnnnnnnnnnnnnnnnnnnnnnnnnnnnnnnnnnnnnnnnnnnnnnnnnnnnnnnnnnnnnnnnnnnnnnnnnnnnnnnnnnnnnnnnnnnnnnnnnnnnnnnnnnnnnnnnnnnnnnnnnnnnnnnnnnnnnnnnnnnnnnnnnnnnnnnnnnnnnnnnnnnnnnnnnnnnnnnnnnnnnnnnnnnnnnnnnnnnnnnnnnnnnnnnnnnnnnnnnnnnnnnnnnnnnnnnnnnnnnnnnnnnnnnnnn

SEQ ID NO: 4362 - DNA, 1010 bp, Xenorhabdus sp.
  unsure (1)..(1010): unsure at all n locations
nnnnnnnnnnnnnnnnnnnnnnnnnnnnnnnnnnnnnnttgacgctccataccgattttttcaagctgatcaacgatcgcttctgtcactaatgctgggacacggtgctgcgctatttcaccggcattgcccattccgtcattcggcgggtggatcgttcccgcaggatcggcggcgaggaattcatgctcctactgccgcgcagcacggtggccgaaggccggcaaaccttccagcggatgctgcacaaagtccgcctttcccgccccctccccgaatttccagatttctcctacaggtgctcggctggcatgacagcctatcggctggcggaaagcgcctactatgctttcatgcgggccgagtcagccctttatgcggccaatgaaacaagccctgaccggcttctggcggtcaccgcttaaatcacctccgccagcaatcaggccatgcatgcaattgccgacgaacagccgacgcccggcgatgtccccaggcttcagtgccnnnnnnnnnnnnnnnnnnnnnnnnnnnnnnnnnnnnnnnnnnnnnnnnnnnnnnnnnnnnnnnnnnnnnnnnnnnnnnnnnnnnnnnnnnnnnnnnnnnnnnnnnnnnnnnnnnnnnnnnnnnnnnnnnnnnnnnnnnnnnnnnnnnnnnnnnnnnnnnnnnnnnnnnnnnnnnnnnnnnnnnnnnnnnnnnnnnnnnnnnnnnnnnnnnnnnnnnnnnnnnnnnnnnnnnnnnnnnnnnnnnnnnnnnnnnnnnnnnnnnnnnnnnnnnnnnnnnnnnnnnnnnnnnnnnnnnnnnnnnnnnnnnnnnnnnnnnnnnnnnnnnnnnnnnnnnnnnnnnnnnnnnnnnnnnnnnnnnnnnnnnnnnnnnnnnnnnnnnnnnnnnnnnnnnnnnnnnnnnnnnnnnnnnnnnnnnnnnnnnnnnnnnnnnnnnnnnnnnnnnnnnnnnnnnnnnnnnnnnnnnnnnnnnnnnnnnnnnnnnnnnnnnnnnnnnnnnnnnnnnnn

SEQ ID NO: 4363 - DNA, 1126 bp, Xenorhabdus sp.
  unsure (1)..(1126): unsure at all n locations
nnnnnnnnnnnnnnnnnnnnnnnnnnnnnnnnnnnnnnnnnnnnnnnnnnnnnnnnnnnnnnnnnnncgaatcgcatcattatatgccaaagactaatcgctgcatggttaatcattcgaagacataacaaaccacagttcatctgatattagttccatgtactcaaagaagataaatattgcatgattnnnnnnnnnnnnnnnnnnnnnnnnnnnnnnnnnnnnnnnnnnnnnnnnnnnnnnnnnnnnnnnnnnnnnnnnnnnnnnnnnnnnnnnnnnnnnnnnnnnnnnnnnnnnnnnnnnnnnnnnnnnnnnnnnnnnnnnnnnnnnnnnnnnnnnnnnnnnnnnnnnnnnnnnnnnnnnnnnnnnnnnnnnnnnnnnnnnnnnnnnnnnnnnnnnnnnnnnnnnnnnnnnnnnnnnnnnnnnnnnnnnnnnnnnnnnnnnnnnnnnnnnnnnnnnnnnnnnnnnnnnnnnnnnnnnnnnnnnnnnnnnnnnnnnnnnnnnnnnnnnnnnnnnnnnnnnnnnnnnnnnnnnnnnnnnnnnnnnnnnnnnnnnnnnnnnnnnnnnnnnnnnnnnnnnnnnnnnnnnnnnnnnnnnnnnnnnnnnnnnnnnnnnnnnnnnnnnnnnnnnnnnnnnnnnnnnnnnnnnnnnnnnnnnnnnnnnnnnnnnnnnnnnnnnnnnnnnnnnnnnnnnnnnnnnnnnnnnnnnnnnnnnnnnnnnnnnnnnnnnnnnnnnnnnnnnnnnnnnnnnnnnnnnnnnnnnnnnnnnnnnnnnnnnnnnnnnnnnnnnnnnnnnnnnnnnnnnnnnnnnnnnnnnnnnnnnnnnnnnnnnnnnnnnnnnnnnnnnnnnnnnnnnnnnnnnnnnnnnnnnnnnnnnnnnnnnnnnnnnnnnnnnnnnnnnnnnnnnnnnnnnnnnnnnnnnnnnnnnnnnnnnnnnnnnnnnnnnnnnnnnnnnnnnnnnnnnnnnnnnnnnnnnnnnnnnnnnnnnnnnnnnnnnnnnnnnnnnnnnnnnnnnnnnnnnnnnnnnnnnnnnnnnnnnnnnnnnnnnnnnnnnnnnnnnnnnnnnnnnnnnnnnnnnnnnnnnnnnnnnnnnnnnnnnnnnnnnnnnnnnnnnnnnnnnnnnnnnn

SEQ ID NO: 4364 - DNA, 855 bp, Xenorhabdus sp.
  unsure (1)..(855): unsure at all n locations
nnnnnnnnnnnnnnnnnnnnnntaggttcctcttgatgcggtaggtgagggacttcagaccccagttctcgatgcgtccgactttgccgccgaacgattcgataacgcccttgtactgctcgacaagtgcgtcgacctgctgggcagaaatatcctgccgggcaaggaagatgtgttcgtaaagagccatttaagctttgcctttcttgcgtttcgtccttcacccggcaacggcgctaagcctcaacgactgctcttgggtgaggccgtaaggccttaaagcaagaaaagcgttgttcgagacggtcgagagcggagacacgggaggccggaaaaaccttatggttcctgctgttccgtcaccggaaccagccctccgttcagccaccagccataagaccgggtgttgtgaacagcgcgcttatacggatttttgcccggaatgcaagggcaaggggcgaaaaagcgcgccgtccggttgtcagatcgccatcggatattgccggtggatcgccgcgatccccttcagcacgtcatccgacagcgtcacgtcggcggcggcaatatccaccttcagctgttccatcgtcgtcgcaccgatgatgactgacgccatgaacggacgggtgaggcaaaacgcgatnnnnnnnnnnnnnnnnnnnnnnnnnnnnnnnnnnnnnnnnnnnnnnnnnnnnnnnnnnnnnnnnnnnnnnnnnnnnnnnnnnnnnnnnnnnnnnnnnnnnnnnnnnnnnnnnnnnnnnnnnnnnnnnnnnnnnnnnnnnnnnnnnnnnnnnnnnnnnnnnnnnnnnnnnnnnnnnnnnnnnnnnnnnnnnnnnnnnnnnnnnnnnnnnnnnn

SEQ ID NO: 4365 - DNA, 970 bp, Xenorhabdus sp.
  unsure (1)..(970): unsure at all n locations
nnnnnnnnnnnnnnnnnnnnnnnnnnnnnnntgtgctctaaagaaccggctctatactgcccggcctcgtcagccccatcctggaactatgcataatcgagtattacctttgtgatgagcgctattaaccgacattggctggttatctgtcttgggtgtgctgcatttcccaaaccacatgcagccgtaaccactcttgggggagccgacctaccctaccacccaatgtcagcattttttctcccatgaagaaggcctccatcatgctgcgatgtatttggatgnnnnnnnnnnnnnnnnnnnnnnnnnnnnnnnnnnnnnnnnnnnnnnnnnnnnnnnnnnnnnnnnnnnnnnnnnnnnnnnnnnnnnnnnnnnnnnnnnnnnnnnnnnnnnnnnnnnnnnnnnnnnnnnnnnnnnnnnnnnnnnnnnnnnnnnnnnnnnnnnnnnnnnnnnnnnnnnnnnnnnnnnnnnnnnnnnnnnnnnnnnnnnnnnnnnnnnnnnnnnnnnnnnnnnnnnnnnnnnnnnnnnnnnnnnnnnnnnnnnnnnnnnnnnnnnnnnnnnnnnnnnnnnnnnnnnnnnnnnnnnnnnnnnnnnnnnnnnnnnnnnnnnnnnnnnnnnnnnnnnnnnnnnnnnnnnnnnnnnnnnnnnnnnnnnnnnnnnnnnnnnnnnnnnnnnnnnnnnnnnnnnnnnnnnnnnnnnnnnnnnnnnnnnnnnnnnnnnnnnnnnnnnnnnnnnnnnnnnnnnnnnnnnnnnnnnnnnnnnnnnnnnnnnnnnnnnnnnnnnnnnnnnnnnnnnnnnnnnnnnnnnnnnnnnnnnnnnnnnnnnnnnnnnnnnnnnnnnnnnnnnnnnnnnnnnnnnnnnnnnnnnnnnnnnnnnnnnnnnnnnnnnnnnnnnnnnnnnnnnnnnnnnnnnnnnnnnnnnnnnnnnnnnnnnnnnnnnnnnnnnnnnnnnnnnnnnnnnnnnnnnnnnn

SEQ ID NO: 4366 - DNA, 566 bp, Xenorhabdus sp.
  unsure (1)..(566): unsure at all n locations
nnnnnnnnnntgtgctctaaggtattatgcgggacaggctgttaactgtcgtttcgctaacgctctgcttcgtctatacgagcatgacgacnnnnnnnnnnnnnnnnnnnnnnnnnnnnnnnnnnnnnnnnnnnnnnnnnnnnnnnnnnnnnnnnnnnnnnnnnnnnnnnnnnnnnnnnnnnnnnnnnnnnnnnnnnnnnnnnnnnnnnnnnnnnnnnnnnnnnnnnnnnnnnnnnnnnnnnnnnnnnnnnnnnnnnnnnnnnnnnnnnnnnnnnnnnnnnnnnnnnnnnnnnnnnnnnnnnnnnnnnnnnnnnnnnnnnnnnnnnnnnnnnnnnnnnnnnnnnnnnnnnnnnnnnnnnnnnnnnnnnnnnnnnnnnnnnnnnnnnnnnnnnnnnnnnnnnnnnnnnnnnnnnnnnnnnnnnnnnnnnnnnnnnnnnnnnnnnnnnnnnnnnnnnnnnnnnnnnnnnnnnnnnnnnnnnnnnnnnnnnnnnnnnnnnnnnnnnnnnnnnnnnnnnnnnnnnnnnnnnnnnnnnnnnnnnnnnnnnnnnnnnnnnnnnnnnnnnnnn

SEQ ID NO: 4367 - DNA, 818 bp, Xenorhabdus sp.
  unsure (1)..(818): unsure at all n locations
nnnttagggggttacgctctgggacgacagaccgcgccgaaacactgtttgcaannnnnnnnnnnnnnnnnnnnnnnnnnnnnnnnnnnnnnnnnnnnnnnnnnnnnnnnnnnnnnnnnnnnnnnnnnnnnnnnnnnnnnnnnnnnnnnnnnnnnnnnnnnnnnnnnnnnnnnnnnnnnnnnnnnnnnnnnnnnnnnnnnnnnnnnnnnnnnnnnnnnnnnnnnnnnnnnnnnnnnnnnnnnnnnnnnnnnnnnnnnnnnnnnnnnnnnnnnnnnnnnnnnnnnnnnnnnnnnnnnnnnnnnnnnnnnnnnnnnnnnnnnnnnnnnnnnnnnnnnnnnnnnnnnnnnnnnnnnnnnnnnnnnnnnnnnnnnnnnnnnnnnnnnnnnnnnnnnnnnnnnnnnnnnnnnnnnnnnnnnnnnnnnnnnnnnnnnnnnnnnnnnnnnnnnnnnnnnnnnnnnnnnnnnnnnnnnnnnnnnnnnnnnnnnnnnnnnnnnnnnnnnnnnnnnnnnnnnnnnnnnnnnnnnnnnnnnnnnnnnnnnnnnnnnnnnnnnnnnnnnnnnnnnnnnnnnnnnnnnnnnnnnnnnnnnnnnnnnnnnnnnnnnnnnnnnnnnnnnnnnnnnnnnnnnnnnnnnnnnnnnnnnnnnnnnnnnnnnnnnnnnnnnnnnnnnnnnnnnnnnnnnnnnnnnnnnnnnnnnnnnnnnnnnnnnnnnnnnnnnnnnnnnnnnnnnnnnnnnnnnnnnnnnnnnnnnnnnnnnnnnnnnnnnnnnnnnnnnnnnnnnnnnnnnnnnnnnnnnnnnnnnnnnnnnnnnnnnnnnnnn

SEQ ID NO: 4368 - DNA, 393 bp, Xenorhabdus sp.
  unsure (1)..(393): unsure at all n locations
nnnnnnnnnnnnnnnnnnnnnnnnnnnnnnnnnnnnnnnnnnnnnnnnnnnnnnnnnnnnnnnnnnnnnnnnnnnnnnnnnnnnnnnnnnnnnnnnnnnnnnnnnnnnnnnnnnnnnnnnnnnnnnnnnnnnnnnnnnnnnnnnnnnnnnnnnnnnnnnnnnnnnnnnnnnnnnnnnnnnnnnnnnnnnnnnnnnnnnnnncccctgaccgaactgtcaactacattttggaacatgcatgtaatgtgatgccacattgcggtgaacaagctggcgtnnnnnnnnnnnnnnnnnnnnnnnnnnnnnnnnnnnnnnnnnnnnnnnnnnnnnnnnnnnnnnnnnnnnnnnnnnnnnnnnnnnnnnnnnnnnnnnnnnnnnnnnnnnnnnnnnnnn

SEQ ID NO: 4369 - DNA, 1042 bp, Xenorhabdus sp.
  unsure (1)..(1042): unsure at all n locations
nnnnnnnnnnnnnnnnnnnnnnnnnnnnnnnnnnnnnnnnnnnnnnnnnntgtcgagcatgaacatggctggggacagatgagtattatcgggtatcaccaaacttctctgtttgacgcatgacgacatgtcctagggggacaggcgatttatctggggggagggcatattgggcaccagctcccttcattatactttaaccttcatcaatgctgacgtactgttaatacacgaccagggttaggaaaatacattagcgaaaccatcttacaccctttattaatacattgcctccatccgttcactctatcacaaaaaatgctgcgctattaaaatattctgaacatcaaatggttaccccattttgtgctatcattcactatctaagctcatgctacacccttgagtattgttatccctgaaactggctacccggatcaccattataacaaaatttctctaatggccctgttgtatatcaattttgannnnnnnnnnnnnnnnnnnnnnnnnnnnnnnnnnnnnnnnnnnnnnnnnnnnnnnnnnnnnnnnnnnnnnnnnnnnnnnnnnnnnnnnnnnnnnnnnnnnnnnnnnnnnnnnnnnnnnnnnnnnnnnnnnnnnnnnnnnnnnnnnnnnnnnnnnnnnnnnnnnnnnnnnnnnnnnnnnnnnnnnnnnnnnnnnnnnnnnnnnnnnnnnnnnnnnnnnnnnnnnnnnnnnnnnnnnnnnnnnnnnnnnnnnnnnnnnnnnnnnnnnnnnnnnnnnnnnnnnnnnnnnnnnnnnnnnnnnnnnnnnnnnnnnnnnnnnnnnnnnnnnnnnnnnnnnnnnnnnnnnnnnnnnnnnnnnnnnnnnnnnnnnnnnnnnnnnnnnnnnnnnnnnnnnnnnnnnnnnnnnnnnnnnnnnnnnnnnnnnnnnnnnnnnnnnnnnnnnnnnnnnnnnnnnnnnnnnnnnnnnnnnnnnnnnnnnnnnnnnnnnnnnnnnnnnnnnnnnnnnnnnnnnnnnnnnnnnnnnnnnnnnnnnnnnnnnnnnnnnnnnnnnnnnnnnn

SEQ ID NO: 4370 - DNA, 914 bp, Xenorhabdus sp.
  unsure (1)..(914): unsure at all n locations
nnnnnnnnnnnnnnnnnnnnnnnnnnnnnnnnnngtgctctaaagtcaccagcgtggcgatgatgaaggcatagccgccccaggccgggaaggtcagttccgccgcataggcaaccgcgaccagaatggtgccagtgaaggtgttgcgggcctttgccgtgcgccaccatgctcctttttcatccgcgccatgggtgtgtccggcctcactgccagaggccactgccgccggctgcgccttctcgtgcgaatgcttggcgtgatcatggtcgtggccgccgcaattggcgtggtcgtggtcatgatccgcgtgatcgtgatctgaatgatcatggccggaatgatcgtggtcatgatcatgatcgtgatcgtggttatggccgccgcaggatccatggtcgtgcgtctggtcatccgtcttttcgcgtgcggccttttcctgcggcagcagggcgggtttgaagccgagcttgcgcagcgtgtcctcgaccttgtcgactgcgggttttcccttcgggagcgaaaggttcaacactctattgcacgaaataaaccttgaactcggcaacaccgggcagacgggagagtgccgtctcgatcttcgctgcacagctgccggaatccatgccgccgaccgaaaggtcagggcattgcttttttaccgcttaaccnnnnnnnnnnnnnnnnnnnnnnnnnnnnnnnnnnnnnnnnnnnnnnnnnnnnnnnnnnnnnnnnnnnnnnnnnnnnnnnnnnnnnnnnnnnnnnnnnnnnnnnnnnnnnnnnnnnnnnnnnnnnnnnnnnnnnnnnnnnnnnnnnnnnnnnnnnnnnnnnnnnnnnnnnnnnnnnnnnnnnnnnnnnnnnnnnnnnnnnnnnnnnnnnnnnnnnnnnnnnnnnnnnnnnnnnnnnnnnnnnnn

SEQ ID NO: 4371 - DNA, 878 bp, Xenorhabdus sp.
  unsure (1)..(878): unsure at all n locations
nnnnnnnnnnnnnnnnnnngtgctctaaagacctaagcgggtaaagaggttgattctaactcgcatgcgagcgtcatcgataattggcgtttcatggctttatcctaaatggggctgacgatggcatcaacagttccgacggttatcatgattgaccctcatctacctgtctggcagggggatatcccacaaaaactatactttacctgcccacatcgaaattgttggttaataatgaacggcctgccattcctgcattccatcagatttgttggttaaatggcagatcctgaacatgcgctcttgccgtatcctctgactgaaccagtccttacttaacaacatatcacctggactcgtgcccctgaatattctgtattaattgggagttatgcttacaataccgggctgttacctttcaaatcagagcgcctaacaaaatctctgcattgataactcacacaataactaacaaggtgaatgccatcatgaaggatattcattgggctcataacgtnnnnnnnnnnnnnnnnnnnnnnnnnnnnnnnnnnnnnnnnnnnnnnnnnnnnnnnnnnnnnnnnnnnnnnnnnnnnnnnnnnnnnnnnnnnnnnnnnnnnnnnnnnnnnnnnnnnnnnnnnnnnnnnnnnnnnnnnnnnnnnnnnnnnnnnnnnnnnnnnnnnnnnnnnnnnnnnnnnnnnnnnnnnnnnnnnnnnnnnnnnnnnnnnnnnnnnnnnnnnnnnnnnnnnnnnnnnnnnnnnnnnnnnnnnnnnnnnnnnnnnnnnnnnnnnnnnnnnnnnnnnnnnnnnnnnnnnnnnnnnnnnnnnnnnnnnnnnnnnnnnnnnnnnnnnnnnnnnnnnnnnnnnnnnnnnnnnnnnnnn

SEQ ID NO: 4372 - DNA, 918 bp, Xenorhabdus sp.
  unsure (1)..(918): unsure at all n locations
nnnnnnnnnnnnnnnnnnnnnnnnnnnnnnnnnagactcttctgcgctgtcgctcgtctgactgcgtatctttgttgttagacgacgggctcatcctattaatgggataattagaccagcccctgcaccttgggccacgtcatattgaccaaggttaagggccggtgcatcatggctttgattccgaggcataaaatagggaccgcactttcccgagtgcgatacttaacttaagtccagttgtccactcgggaatagaatcacatctttggggaaccgccaaagatgcatcatactgctgctgggannnnnnnnnnnnnnnnnnnnnnnnnnnnnnnnnnnnnnnnnnnnnnnnnnnnnnnnnnnnnnnnnnnnnnnnnnnnnnnnnnnnnnnnnnnnnnnnnnnnnnnnnnnnnnnnnnnnnnnnnnnnnnnnnnnnnnnnnnnnnnnnnnnnnnnnnnnnnnnnnnnnnnnnnnnnnnnnnnnnnnnnnnnnnnnnnnnnnnnnnnnnnnnnnnnnnnnnnnnnnnnnnnnnnnnnnnnnnnnnnnnnnnnnnnnnnnnnnnnnnnnnnnnnnnnnnnnnnnnnnnnnnnnnnnnnnnnnnnnnnnnnnnnnnnnnnnnnnnnnnnnnnnnnnnnnnnnnnnnnnnnnnnnnnnnnnnnnnnnnnnnnnnnnnnnnnnnnnnnnnnnnnnnnnnnnnnnnnnnnnnnnnnnnnnnnnnnnnnnnnnnnnnnnnnnnnnnnnnnnnnnnnnnnnnnnnnnnnnnnnnnnnnnnnnnnnnnnnnnnnnnnnnnnnnnnnnnnnnnnnnnnnnnnnnnnnnnnnnnnnnnnnnnnnnnnnnnnnnnnnnnnnnnnnnnnnnnnnnnnnnnnnnnnnnnnnnnnnnnnnnnnnnnnnnnnnnnnnnnnnnnnnnnnnnn

SEQ ID NO: 4373 - DNA, 271 bp, Xenorhabdus sp.
  unsure (1)..(271): unsure at all n locations
nnnnnnnnnnnnnnnnnnnnnnnnnnnnnnnnnnnnnnnnnnnnnntatattgtagcaccatccctaattattcggacccatggctaactattttgatacattgnaatttacgtccagnncagtttggccgcaagctggggcaaaattgccccgtttttttannnnnnnnnnnnnnnnnnnnnnnnnnnnnnnnnnnnnnnnnnnnnnnnnnnnnnnnnnnnnnnnnnnnnnnnnnnnnnnnnnnnnnnnnnnnnnnnnnnnnnnnnnnnn

SEQ ID NO: 4374 - DNA, 905 bp, Xenorhabdus sp.
  unsure (1)..(905): unsure at all n locations
nnnnnnnnnnnnnnnnnnnnnnnnnnnnnnnnnnctgccccacattggtttcaaatacattgaggataatgtgatctttcccctgtctatctggacggcggttgtgctccacatactgggttggaccactaatcgtcacggcgtgtgatgggtcattcttgccgcggctgatccagcgctcaccttgagcgcttgggtgcccggatcggacacccggtacagtctttattacctcacctacacttttaccctgtccgactggagaatttacgctactgccttttccactgttctgttgtgtgctggtgcccagtttgccaccaggtgtccagcctgnnnnnnnnnnnnnnnnnnnnnnnnnnnnnnnnnnnnnnnnnnnnnnnnnnnnnnnnnnnnnnnnnnnnnnnnnnnnnnnnnnnnnnnnnnnnnnnnnnnnnnnnnnnnnnnnnnnnnnnnnnnnnnnnnnnnnnnnnnnnnnnnnnnnnnnnnnnnnnnnnnnnnnnnnnnnnnnnnnnnnnnnnnnnnnnnnnnnnnnnnnnnnnnnnnnnnnnnnnnnnnnnnnnnnnnnnnnnnnnnnnnnnnnnnnnnnnnnnnnnnnnnnnnnnnnnnnnnnnnnnnnnnnnnnnnnnnnnnnnnnnnnnnnnnnnnnnnnnnnnnnnnnnnnnnnnnnnnnnnnnnnnnnnnnnnnnnnnnnnnnnnnnnnnnnnnnnnnnnnnnnnnnnnnnnnnnnnnnnnnnnnnnnnnnnnnnnnnnnnnnnnnnnnnnnnnnnnnnnnnnnnnnnnnnnnnnnnnnnnnnnnnnnnnnnnnnnnnnnnnnnnnnnnnnnnnnnnnnnnnnnnnnnnnnnnnnnnnnnnnnnnnnnnnnnnnnnnnnnnnnnnnnnnnnnnnnnnnnnnnnnnnnnnnn

SEQ ID NO: 4375 - DNA, 925 bp, Xenorhabdus sp.
  unsure (1)..(925): unsure at all n locations
nnnnnnnnnnnnnnnnnnnnnnnnnnnnnnnnnnnagcgctctaaagcctgttagcactttgcgcctggattttggcccccacacactatgattctcaatctgaattattttgtggctgccatttctgtaaaacatattgcacctctcgagccccacaatatcccacctaaagctgaccgattaacttctggggctataaccttttatatggcaaaataaaacctgaccttttaccgattttatcttatcccccttattgcgagataatgtgttcaccaaccctggaacacacaaacacccttattatctgccggtttatcatagggaggccagggcataccaactatggaagacacttccttgactttatggcaggaagcacactgtgtttgtagtccttatataacgctaagaatgaaactgcaaatatttttcaccatgaagcttttaataagattgattttttgtcactctgatgaagacactttaacactgacataggaatctcgacttttttcttcctacatgagcgtacacgcctacacccnnnnnnnnnnnnnnnnnnnnnnnnnnnnnnnnnnnnnnnnnnnnnnnnnnnnnnnnnnnnnnnnnnnnnnnnnnnnnnnnnnnnnnnnnnnnnnnnnnnnnnnnnnnnnnnnnnnnnnnnnnnnnnnnnnnnnnnnnnnnnnnnnnnnnnnnnnnnnnnnnnnnnnnnnnnnnnnnnnnnnnnnnnnnnnnnnnnnnnnnnnnnnnnnnnnnnnnnnnnnnnnnnnnnnnnnnnnnnnnnnnnnnnnnnnnnnnnnnnnnnnnnnnnnnnnnnnnnnnnnnnnnnnnnnnnnnnnnnnnnnnnnnnnnnnnnnnnnnnnnnnnnnnnnnnnnnnnnnnnnnnnnnnnnnnnnnnnnnnnnnnnnnnnnnnnnnnnnn

SEQ ID NO: 4376 - DNA, 249 bp, Xenorhabdus sp.
  unsure (1)..(249): unsure at all n locations
nnnnnnnnnnnnnnnnnnnnnnnnnnnnnnnacatatgcgaactctactaaagttaatatgctatgagacatactacgtatcgnnnnnnnnnnnnnnnnnnnnnnnnnnnnnnnnnnnnnnnnnnnnnnnnnnnnnnnnnnnnnnnnnnnnnnnnnnnnnnnnnnnnnnnnnnnnnnnnnnnnnnnnnnnnnnnnnnnnnnnnnnnnnnnnnnnnnnnnnnnnnnnnnnnnnnnnnnnnnnnnnnnnnn

SEQ ID NO: 4377 - DNA, 475 bp, Xenorhabdus sp.
  unsure (1)..(475): unsure at all n locations
nnnnnnnctgtgctctaagagttttatctgcacggagaattgctgccactgcattactgaagcgaaattgtgggtnnnnnnnnnnnnnnnnnnnnnnnnnnnnnnnnnnnnnnnnnnnnnnnnnnnnnnnnnnnnnnnnnnnnnnnnnnnnnnnnnnnnnnnnnnnnnnnnnnnnnnnnnnnnnnnnnnnnnnnnnnnnnnnnnnnnnnnnnnnnnnnnnnnnnnnnnnnnnnnnnnnnnnnnnnnnnnnnnnnnnnnnnnnnnnnnnnnnnnnnnnnnnnnnnnnnnnnnnnnnnnnnnnnnnnnnnnnnnnnnnnnnnnnnnnnnnnnnnnnnnnnnnnnnnnnnnnnnnnnnnnnnnnnnnnnnnnnnnnnnnnnnnnnnnnnnnnnnnnnnnnnnnnnnnnnnnnnnnnnnnnnnnnnnnnnnnnnnnnnnnnnnnnnnnnnnnnnnnnnnnnnnnnnnnnnnnnnnnnnn

SEQ ID NO: 4378 - DNA, 487 bp, Xenorhabdus sp.
  unsure (1)..(487): unsure at all n locations
nnnngtgctctaagaagggcagaaggtggtacctttttctgcggttgctcggcgacgccacatactggacgacaacgaagccgctggagctagctagggtaattggcgacccataaaagtagtcgctctctgacagttcgacacaacnnnnnnnnnnnnnnnnnnnnnnnnnnnnnnnnnnnnnnnnnnnnnnnnnnnnnnnnnnnnnnnnnnnnnnnnnnnnnnnnnnnnnnnnnnnnnnnnnnnnnnnnnnnnnnnnnnnnnnnnnnnnnnnnnnnnnnnnnnnnnnnnnnnnnnnnnnnnnnnnnnnnnnnnnnnnnnnnnnnnnnnnnnnnnnnnnnnnnnnnnnnnnnnnnnnnnnnnnnnnnnnnnnnnnnnnnnnnnnnnnnnnnnnnnnnnnnnnnnnnnnnnnnnnnnnnnnnnnnnnnnnnnnnnnnnnnnnnnnnnnnnnnnnnnnnnnnnnnnnnnnnnnnnnnnnnnnnnnnnn

SEQ ID NO: 4379 - DNA, 431 bp, Xenorhabdus sp.
  unsure (1)..(431): unsure at all n locations
catgtgcttaggtaaaggttcgttattttgaggcccttcaagctcgagccggttacaccggaaatnggtatggcggttccatacggatgatacnnnnnnnnnnnnnnnnnnnnnnnnnnnnnnnnnnnnnnnnnnnnnnnnnnnnnnnnnnnnnnnnnnnnnnnnnnnnnnnnnnnnnnnnnnnnnnnnnnnnnnnnnnnnnnnnnnnnnnnnnnnnnnnnnnnnnnnnnnnnnnnnnnnnnnnnnnnnnnnnnnnnnnnnnnnnnnnnnnnnnnnnnnnnnnnnnnnnnnnnnnnnnnnnnnnnnnnnnnnnnnnnnnnnnnnnnnnnnnnnnnnnnnnnnnnnnnnnnnnnnnnnnnnnnnnnnnnnnnnnnnnnnnnnnnnnnnnnnnnnnnnnnnnnnnnnnnnnnnnnnnnnnnnnnnnnnnnnnn

SEQ ID NO: 4380 - DNA, 972 bp, Xenorhabdus sp.
  unsure (1)..(972): unsure at all n locations
nnnnnnnnnnnnnnnnnnnnnnnnnatgtgctctaaagtacgttccaaggcccaggccgttccggtcatacagtccggccaataaaaataaaactgcctttcaatgctgggggggaaacgttaattgcggcgggatcccttgacaaaaatgtagctgccggccatggatgcgggcgaggggctgtacnnnnnnnnnnnnnnnnnnnnnnnnnnnnnnnnnnnnnnnnnnnnnnnnnnnnnnnnnnnnnnnnnnnnnnnnnnnnnnnnnnnnnnnnnnnnnnnnnnnnnnnnnnnnnnnnnnnnnnnnnnnnnnnnnnnnnnnnnnnnnnnnnnnnnnnnnnnnnnnnnnnnnnnnnnnnnnnnnnnnnnnnnnnnnnnnnnnnnnnnnnnnnnnnnnnnnnnnnnnnnnnnnnnnnnnnnnnnnnnnnnnnnnnnnnnnnnnnnnnnnnnnnnnnnnnnnnnnnnnnnnnnnnnnnnnnnnnnnnnnnnnnnnnnnnnnnnnnnnnnnnnnnnnnnnnnnnnnnnnnnnnnnnnnnnnnnnnnnnnnnnnnnnnnnnnnnnnnnnnnnnnnnnnnnnnnnnnnnnnnnnnnnnnnnnnnnnnnnnnnnnnnnnnnnnnnnnnnnnnnnnnnnnnnnnnnnnnnnnnnnnnnnnnnnnnnnnnnnnnnnnnnnnnnnnnnnnnnnnnnnnnnnnnnnnnnnnnnnnnnnnnnnnnnnnnnnnnnnnnnnnnnnnnnnnnnnnnnnnnnnnnnnnnnnnnnnnnnnnnnnnnnnnnnnnnnnnnnnnnnnnnnnnnnnnnnnnnnnnnnnnnnnnnnnnnnnnnnnnnnnnnnnnnnnnnnnnnnnnnnnnnnnnnnnnnnnnnnnnnnnnnnnnnnnnnnnnnnnnnnnnnnnnnnnnnnnnnnnnnnnnnnnnnnnnnnnnnnnnnnnnnnnnnnnnnnnnnnnnnnnnnnnnnnnnnnnnnnnnnnnnnnn

SEQ ID NO: 4381 - DNA, 841 bp, Xenorhabdus sp.
  unsure (1)..(841): unsure at all n locations
nnnnnnnnnnnnnnnnnnnnnnnnnnnnnnnnnnnnnnnnnnnnnnnnnnnnnnnnnnnnnnnnnnnnnnnnnnnnnnnnnnnnnnnnnnnnnnnnnnnnnnnnnnnnnnnnnnnnnnnnnnnnnnnnnnnnnnnnnnnnnnnnnnnnnnnnnnnnnnnnnnnnnnnnnnnnnnnngccctaaggggtgatcttgctggcggcaaagaccgagaccgcggcactgccgaggatgatcagccccgatccacatggccgcgaaaatncttttcccaggcccggccnctcggncgtgggcgtggaactcccattattggcgggannaattttcccggccgcaactcaagtcccatttcccggttcttttnttttcccagacggcgaattaaggccggccccatggggggggnccagggatttttcccggtgaacggatgaccattgcggtgcgtgggctctccaaccccggggcccagccgccttttttccaggaaaaccttccgacnnnnnnnnnnnnnnnnnnnnnnnnnnnnnnnnnnnnnnnnnnnnnnnnnnnnnnnnnnnnnnnnnnnnnnnnnnnnnnnnnnnnnnnnnnnnnnnnnnnnnnnnnnnnnnnnnnnnnnnnnnnnnnnnnnnnnnnnnnnnnnnnnnnnnnnnnnnnnnnnnnnnnnnnnnnnnnnnnnnnnnnnnnnnnnnnnnnnnnnnnnnnnnnnnnnnnnnnnnnnnnnnnnnnnnnnnnnnnnnnnnnnnnnnnnnnnnnnnnnnnnnnnnnnnnnnnnnnnnnnnnnnnnnnnnnnnnnnnnnnnnnnnnnnnnnnnnnnnnnnnnnnnnnnnnnnnnnnn

SEQ ID NO: 4382 - DNA, 769 bp, Xenorhabdus sp.
  unsure (1)..(769): unsure at all n locations
nnnnnnnnnnnnnnnnnnnnnnnnnnnnnnnnnnnnnnnnnnnnnnnnnnnnnnnnnnnnnnnnnnnnnnnnnnnnnnnnnnnnnnnnnnnnnnnnnnnnnnnnnnnnnnnnnnnnnnnnnnnnnnnnnnnnnnnnnnnnnnnnnnnnnnnnnnnnnnnnnnnnnnnnnnnnnnccatgtgctctaaagctcagcaccccacgaggcggctcggcccaaatccgcgggcggcgcctgatccagacggannnnnnnnnnnnnnnnnnnnnnnnnnnnnnnnnnnnnnnnnnnnnnnnnnnnnnnnnnnnnnnnnnnnnnnnnnnnnnnnnnnnnnnnnnnnnnnnnnnnnnnnnnnnnnnnnnnnnnnnnnnnnnnnnnnnnnnnnnnnnnnnnnnnnnnnnnnnnnnnnnnnnnnnnnnnnnnnnnnnnnnnnnnnnnnnnnnnnnnnnnnnnnnnnnnnnnnnnnnnnnnnnnnnnnnnnnnnnnnnnnnnnnnnnnnnnnnnnnnnnnnnnnnnnnnnnnnnnnnnnnnnnnnnnnnnnnnnnnnnnnnnnnnnnnnnnnnnnnnnnnnnnnnnnnnnnnnnnnnnnnnnnnnnnnnnnnnnnnnnnnnnnnnnnnnnnnnnnnnnnnnnnnnnnnnnnnnnnnnnnnnnnnnnnnnnnnnnnnnnnnnnnnnnnnnnnnnnnnnnnnnnnnnnnnnnnnnnnnnnnnnnnnnnnnnnnnnnnnnnnnnnnnnnnnnnnnnnnnnnnnnnnnnnnnnnnnnnnnnnn

SEQ ID NO: 4383 - DNA, 764 bp, Xenorhabdus sp.
  unsure (1)..(764): unsure at all n locations
nnnnnnnnnnnnnnnnnnnnnnnnnnnnnnnnnnnnnnnnnnnnnnnnnnnnnnnnnnnnnnnnnnnnnnnnnnnnnnnnnnnnnnnnnnnnnnnnnnnnnnnnnnnnnnnnnnnnnnnnnnnnnnnnnnnnnnnnnnnnnnnnnnccaagtgctctaaagaagcgaaaataaaaatggtaacgcggatgtttaccagaccatgaaaaacctcgctgcaaaatggaacaacatagtacccagaaaccgcagnaataaccgctacgttggagcccatttgggggtttagnatgcctnnaatacctcctgtnnncatttctggagggggacccggcggnaccagnataaaaaagaaggggccnaaaacttaaaattgaggaattgctgggataaatcnnnnnnnnnnnnnnnnnnnnnnnnnnnnnnnnnnnnnnnnnnnnnnnnnnnnnnnnnnnnnnnnnnnnnnnnnnnnnnnnnnnnnnnnnnnnnnnnnnnnnnnnnnnnnnnnnnnnnnnnnnnnnnnnnnnnnnnnnnnnnnnnnnnnnnnnnnnnnnnnnnnnnnnnnnnnnnnnnnnnnnnnnnnnnnnnnnnnnnnnnnnnnnnnnnnnnnnnnnnnnnnnnnnnnnnnnnnnnnnnnnnnnnnnnnnnnnnnnnnnnnnnnnnnnnnnnnnnnnnnnnnnnnnnnnnnnnnnnnnnnnnnnnnnnnnnnnnnnnnnnnnnnnnnnnnnnnnnnnnnnnnnnnnnnnnnnnnnnnnnnnnnnnnnn

SEQ ID NO: 4384 - DNA, 682 bp, Xenorhabdus sp.
  unsure (1)..(682): unsure at all n locations
nnnnnnnnnnnnnnnnnnnnnnnnnnnnnnnnnnnnnnnnnnnnnnnnnnnnnnnnnnnnnnnnnnnnnnnnnnnnnnnnnnnnnnnnnnnnnnnnnnnnnnnnnnnnnnnnnnnnnnnnnnnnnnnnnnnnnnnnnnnnnnnnnnnnnnnnnnnnnnnnnnnnnnnnnnnnnnnnnnnnnnnnnnnnnnnnnnnnnnnnnnnnnnnnnnnnnnnnnnnnnnnnagtgctctaaagagtagtattggagttgagttatgttatgattggaatctaattaaaaagttatagtgataatagaaatgattgtggagttattgtagaaagacatatgcaaaagattattgatattatagatattttagtgaaaaagttgagagattatgtttatgaaatatagttagtgaatatagtaacgatatataattcaatggagaagtaatgggactatataggtaaatagggaatattattatcgagaagataacaatgatgatggagataatcgatattatcaaagaaaagatgggttgttttataaaaannnnnnnnnnnnnnnnnnnnnnnnnnnnnnnnnnnnnnnnnnnnnnnnnnnnnnnnnnnnnnnnnnnnnnnnnnnnnnnnnnnnnnnnnnnnnnnnnnnnnnnnnnnnnnnnnnnnnnnnnnnnnnnnnnnnnnnnnnn

SEQ ID NO: 4385 - DNA, 19 bp, Xenorhabdus sp.
gagatcgatccggatacag

SEQ ID NO: 4386 - DNA, 18 bp, Xenorhabdus sp.
aatattcaaacggcgctc

SEQ ID NO: 4387 - DNA, 23 bp, Xenorhabdus sp.
ccggaacckcarttrggyraagg

SEQ ID NO: 4388 - DNA, 20 bp, Xenorhabdus sp.
gcctgagtytgtgcytgctg

SEQ ID NO: 4389 - DNA, 23 bp, Xenorhabdus sp.
cgtgatgcggaaaactggtatca

SEQ ID NO: 4390 - DNA, 23 bp, Xenorhabdus sp.
tgrctracrcgwggattrgaaag

SEQ ID NO: 4391 - protein, 229 aa, Xenorhabdus sp.
TQFNLLPSRFTALQKRNLLSVDGMVRPLDKNAHGFVRSEGVGCILLKNLQLAMKDDDEILANVKSAASWHGGQGDSFTAPNASTHMNVMTSAFKEANADIERLQYVEAHGIASYVGDLSEADAITAFLSKSALASCVVSSMKSNVGHLEVCSGIAGFVRTILAMKHQQIPGISELHELNENIDSHRLRIKNISQPFNQPEGLVGLLSYGLNGVSAFVLLEPVTTHAENR

SEQ ID NO: 4392 - protein, 638 aa, Xenorhabdus sp.
DKIAIVGISCRFPGCYNQEAFWKLYQEKKSAIAEIPEFRWAVSQHYSPYFEKNKSISRWAGLVENFDRFDAPYFNITPREAELMDPQQRISLELAVECLEDAGYGVSDVKSADIGVFLGVCNFDYKERLEKSITNIQGHLSTGTYTTLIPNRISFYLDLKGPSVPIDTACSSSLVALSYAMQSIHAGDCEAAFVGGVSYLFSHTYFVAFSQAGMLSRTGSCKTFDKQADGYVRGEGAGMILIKPLKKALADNDRIYGVIDAVAVNHGGNVATITSPNAYAQANVIKKALQKANISANSISYIESHGTGTPKGDPIEVNGLKRAFRAHAKECGETLGTAYCALSGSKTNVGHLESASGMVGLIKGLLSIQKKRLLPMLNFTELNPKIILEESPFRILTEECDWQPAEGEVRCFGVSSFGFGGVNAHAIVSEYQEQRAFKPEPTTRVFAFSASSDKALRAYALLISTFLQNTPTVSVSDCAYTLARRTNLPHRVAFIYRTRQELLEKIISFSNGLSAATLSVGEYSECEKVTAWLNGEKDNLRDLFSADYDRITYVPPYPFQHNTYFPDEFETKQNETVENKIIRNEKQNNVIKLYQIEPLFSSVTSSYDELNHEKNRSPIIFSMLDENQSSVLRKTCFT

SEQ ID NO: 4393 - protein, 287 aa, Xenorhabdus sp.
MIEIPFPQNQENEPLERSVFFISDGTAITAEVLGHAVLSQFPITMTSYTLPFVTNKIRAEEIRNQINNLYQATNIRPLVFYSIISSEVKNIITSSDGFCLDIVQTLVAPLQQEIGLEPKPELHRTHGLSKKNLSQYDARIAAIDYALAHDDGISLRNLDQAQVIILGVSRCGKTPTSLYLAMQFGIQAANYPFTADDMDNLQLPADLKPFQHKLFGLTINPERLAAIREERRENSRYASLRQCRIELAEVEALFRKNKINYLNTTNYSVEEISAKIIDSMGLKRRMF

SEQ ID NO: 4394 - protein, 959 aa, Xenorhabdus sp.
MRKHNQNAGADRFVEQWRVCLQGLDTDNVLILALLKKALSDIDAIRFNDLQSGRQLSWRQLLCSIARIYRYMHELNVTRGQRVVTISHNCWELLAIEFACQLKGAIYAPVYANYSEEMMTYCLSLAEPALVITEKVSLAQTLAQHSPWQVMTLEQAGPFPDFAGIDRETDLISPDKAVSHEAIGEALLRAITTDLQATQAEQAFCLMFTSGSSGKPKGVLLSQNNILSQQQALQTLWHFDGPQSFLSYLPWHHSFGGLFEKYTAIFSQAMLHIDNSRGMDIDRMCTNLSQLKPTRFFSVPKILTVVANKMKHSEAFHRAVAPTLQMIFSAASKLPPDIEDYFKHCGIYVAEGWGLTETSPCLTLKGPGYEEHNSVGRPLPNVILSIDEDSGEILAKGPNVMLGYYADEAANQRCFRQGWFRTGDLGKMIKGELVLLGRLDSVKKLSNGEKVSSDAIEQSLFEKTDIINHAIIDIEQRPYATALLFINPELCRQRFGENCTLQHSSRLQEHIAEVVQQHNQQVEDSSFKLIAVAVTETSLSLEKGEVTPSFKVSQRTVRENYQAVRDALYDTSQPFHLNPACHSFLKITENHIVSSVIPQEAVPIQRINWETFVHIIGQVRGQKLAEDDVQRSLMDLGYNSVTIVQLADSLSQAMGHAVTEVVLFSASSIHQLWQRLAVPVPTVKTSSVKTTDESLLHTEARISLPSEQNNAEVAIIGYAGRFPGAEDCDQLWENLLAGKSQFSRCPEDRPFMASLLAEFEANGIQLSGAFCDDIRQFNHSFFQITPKDARLMDPQHRLLLMVTWEAIEQANLSLNDLKESRTGVFVGISQNGYRQLLQDYLTETGEEGYPSSAINNQNSVCANRLSYFLDLRGPSLTVDTLCSSSLVALHQARLSIERGECDTAIVAGVHLQLDMAHFREMQQLSVLSHDGICRPFDAKANGTVLGEGAGVVILKRHDL

SEQ ID NO: 4395 - protein, 199 aa, Xenorhabdus sp.
KNILVTGATGVMGGRVLLEILMTTDANVYCLTRAENNQQALMRLEDFLFTYDPEKRSRDSLHRIIPVLGDITETNLGLTEPFYSELAGKIDRVIHCAAWTNLVASYSRLAAVNVTGTGHVIEFCLRGDIPMLYTSSFSIVGENLYRDGFVMHETDLDVGQRFDDMDYERTKFEAEQAVHRAGEKGLRWVIVRPGNMLGR

SEQ ID NO: 4396 - protein, 670 aa, Xenorhabdus sp.
SKGITAPDPLAQQQLLEQCCANADVKASDIGYFETHGTGTHLGDPIEMAGIHACFHVQKAQTPCYLGAIKANIGHLEAAAGIAGLIKLLLIDKHRIAPPVAGFSELNPRITLTEGQLAIPTSAQPLAPEKTCLAVSAFGMGGTGAHVVIKSHHKSQKRLVETEPENQTLPCVLSGYDQAHLKAFACRLLVDVQQHIKQKQFVLRDFCQTLAQRTVLPVVCTLGVNSAEQLVEQLSAVSRGEIIGYSASEHGPSIADTTTDKTTMALVFAGQGTQSVAMAAQLYRHNVQFAQWIDQIDQLCSEIAHESGQLKVEVRQLLIEQVDEQIINRTEFAQVILFAFEYALYQCLRPAIGRIDILLGHSLGEYVAACIANVFSLKEGLRIIIKRAQLMEASDPRGAMMMVNGSAEQVSELIEHAELTIAAENSETNTIISGTRDALERFRQKLEQHELHARFINTNRAFHSPMMGKAAQEFGAFLTDIPLKVAEVPILSNLTGQPETACFATVEYWQQHMLGRVFFRRNLENLVAMAGLKIIEIGPKSMLSVWLSEKQPQHFASAYSPSQNSQQLNYCDLLAVLASDCLSGSPREWLTMYSPFTFNPALLPARKLLTETCWFTEYTATLANGVRQQKQPEEYEQGNLNDHEPFFIMQQQIDCMNAIFQAQLELMKGK

SEQ ID NO: 4397 - protein, 1079 aa, Xenorhabdus sp.
MNHPETLKPFALSEAQSSRWFQYQINPAQRGQNNSAFCARVRGLTAEKLEEALNHLIKRHPMLRASFGQYGGKLGYQIAENAIVTIKKHDARDLDAETLQQLVHNDCWYPFDLENPLRIYVSWYQCHDQECVMVLTFDHIAVDGWSYWILLEELGILLTGQELPPAAERSYQDYVTWQQQWLNSNNAKKQQKFWVDNLSGELTELQLPVSSKSSDSAPSFVANKITVARKLPDTLAAKLIALTPKYHNSLFAIFLAAYQLLLHRYTGQDDILVGSIMPGRSRSLWGKVVGEFINPVALRAQIKGEMTVQEHILQAAKSIRQAIENQKYPFAKILEHIKLQRNADTHPVFQTTMTFQQPRYVSNLTSLWMDQSGTTTVGWGGAKLRSFPYPYYAEMPVPLMINLIEIDQQINCGFHYDTKLFDSEFITQLMDNFFTLLAAIADDDQQVISHLPLMDEHQLQQVLSDFNATNVSYPKDALIHQLFEQQADHTPEAMALVYGDSQLTYDELNRRANQLAHYLIGLGVQPDDRIAICVERSPEMIVGLLGILKAGAAYVPLDPAYPAERLAYMLEDAAPVALLTQSSLTDRLENAPTIVLLDDSNSSAFNPMPDTNPDHRTIGLNSHHLAYVIYTSGSAGKPKGVMVEHHNVINLHIGLQLMLDLAPSSRVALNASIVFDASLQSWSQLLAGHTLVIIPNAIRTDGPQLWRYFEHHKVDMFDCTPVQLHGLLNAGLGTSTGYQPKLALIGGEAIHPAVWSRLQQIKTTRFINAYGPTECTVQATFCPVDSSLPLPSIGKPVANTRIYILDPNGQPTPLGVTGEIYIGGSGVSRGYLNRSELTAERFIADPFVTDPNARLYKTGDLGRWLSDGNIEYLGRNDFQVKIRGFRIELGEIEARLAQCAGVQQVVVIAREYDTADTRLVAYIVPDSDITPGISELREQLSSSLPEHMVPSAFVMLEAFPLTVSGKLDRHALPAPDYSSVSSQEYAAPQGETEEQLADIWRTILKIDRVGRHDNFFELGGHSLLVLQLQSKVNEIFEVDLSIQQLFAHPSISQLEECIINAQLMQFDAGSLQGLYESME

SEQ ID NO: 4398 - protein, 289 aa, Xenorhabdus sp.
MFPGQGAQFQGMGRNLFDKYEYHMRLAQQVLGYSLVKVCENEPNVLNKTEFTQPALFVTNILHYLDGLEKHGTEAEIFVGHSLGEYCALFAAGAFSFETALSIVQERGRCMALCSEGAMAAVIGLKLERVEFLLADSEFPDLTISNFNSPTQFIISGSQSELSQFRKSVLKAKGIFHPLQVNGAFHSKRMESIASEFKSFLESVEIYSLKAQVLSNVTADYYPCNNRDQLIDLLVKQLSHPVRWQQCMEKLYSDKFISSKPIVGFEYGPKPVVGPLAKKILGEHITLMN

SEQ ID NO: 4399 - protein, 3034 aa, Xenorhabdus sp.
MEYSIIGVAAQFCGGLSLSHYWQTLVEGGSLMGVIDEERYQLNNRQTPVKWGIKEKIRGMFLEDIDSFDRHIFPLSGSAIMFADPRQRLFLQTCWQLLEDAGLAASTLAGKKVGVFVAQDGWYLNSYVDRIPDEHKESQEFIVPGNDPCFLANRVSFFFNFHGPSIVVDTTCSSAFVALDMACQALEDGDCDYAIVGGISLFLNPWKAGETTATPFETSGEDIHSFSEKASGYRTSEGCAALLLQRNSDEVNQRHHVYGVVQASGHNSGGKTNSFAQPNKEQQINLFQTVLKRANLLPEQINYIEAHGVASQMGDAIEANALVDVFARPQNAAPCYVSTVKPNIGHNHASSGFYAIIKGLMAFRYNQIPLIRGLDKATLNAGIPSDTQGIQFLTETVDWPQSEGGTPRHIFFSSYGFSNVNAAIVLREPDNSSATKISPLVETVTEKPVLVCLSAKSDEQLYQQVVNLCKTVSEPDFTENFNLHELAWTLSTGREAFTHRWATLVSSTEQLRCVLEAFTESPEKQYSTIYQGILAQNVREEVLTAQRAELAVAANNGFPVTSLETVARCWITGVDIDWMQYWGDAEWRRIPLPTYPFAKTCYWVPKGEIRSLSSQEVSSQKGASQFIHPFVHQNTSDFAEQRFSTTFSGEEFCLKGHVIHGIRVLPGVGHLELARVASHHSFGSTPNSSSEVKEKTGLALKNVVWAQIIGVIDEPQQVHIRFINHGNGEAGYQLYSGAEEETIHNTGVATRKALTPAPVYDIDNLKSRYLQNAYSPKQYYDMYYALGLYMAPDYQGIEELYVGMDHVLAKLSLPESLEPTRDQFVLHPCLMDGALLSSVGLLMRFGDLNRPIPPKCLIPFALDEIEFHDEESQLHWAWISYSSDSSASDPFPKVDVDCCDINGKVCIRFKGFSCRGLGAQSAPPAEEAPYLLQPQWKNQALPADTALRAATKRIVFLCELESLQSELLFRSDTDTCEYIVLPKILHDESPLKRQQNVITLCKKIDDLIQHSPTEPVLIQLVLPEARPEYAIVTALLKTAYQNNANLLSQTIYCDDEDGLIEKLSEETSQIKYDTVLWQSEERWVPHWTAWTPESDSVDNLTPPWKEKSVYLIVDEDGSMGRAIARDITTHTDSAIAIVLSESEKNQYQITIASKTTTINDSVICLDTVTLAALVSRIEQNFGALRGVFFCVGTHFATNSQHTENQALTSILERYQGLSRLEKVTQGVSLDFFTVLTYRDGVLGSSGYPLFSAYCAAVNNFVRHSQQSPESAQYQKQTLSLILPQSNGTNEGEFIRHMALQSLYQALHERFSGELMLMEGGTIERFRAEMLGIRPYYEPAFSSTTENNVNSLASQEQASSDLEPTAVDLIKRVVSKAVSLPLAEIDENAGMEKYGIDSILSIKMTEALEQDFGVLPKTLFFEYLTIRELAAYFVKHHRLVLLEGAQNHSQNKNVQTSSISEDSRLSVQPFPGRTDKTENLFVSQTGEVANTTSESDDIAIVGLAGRFPQARNMRDFWQLLREGQDCITEIPFERWDHSRYFDMDKTKRGKTYGKWGGFIDGVDEFDPLFFNLSPRDARVMSPQERLFLQCAYETIEDAGYSHRTLGSRDWTRLPKKTGVYVGVMYGEYEFYSIEELAKGNVLEQSIVTGSFGSIANRVSHFFNINGPSLAVDTMCSSSLTSIYLACQALRQGDIEMALAGGVNVSIHPNKYLILGQSKFLSDEGRCQSFGEGGTGYVPSEGVGAVLLKPLTKAIADGDHIYGVIKGIAVNHGGKTNGYTVPNPIAQAEVISQAIQSSGVSPRAISYIEAHGTGTSLGDPIEIAGLSRAFQQCLQDNDTQESAFCAIGSVKSNMGHCESAAGIAGVAKVLMQIKHRQLVPSLHSRELNPNIDFDASPFYVQRELADWKRPLLGELGQNKEEQSEHPRTAGISSFGAGGTNAHLVVQEYIPANDLNSINNTDWPKWAVIPLSAKNHDQHRELAQNLSQYLKEQAKWYSEVSKAEYLHSLAYTLQTGREEMEERVTFMVDSLSALIDSLKVFSLSCLPSAHFWMGRVEKSKSAKQLMTPVYAGKDKQEEEYEQLQQIASAWTQGHDIDWQGYYQSLPVRPNRLSLPTYPFARERYWIPEPEAQIADFAVAVEEIDSTKEMTSTVLYTSGWERCDISQSTTYAMKPKHTDLFVIGNANETSLTELALLTSVDNVHYLRTENDLHTDSLHSSSLSDLVLRLTNYCQQRIHSGQGLPTFIAVFAPWKNNGLPYRALLGALRTLSMEFPVVQTKLILDAALDNADSETFIRHAEKELLSLDQLSSAVCYQEKDQRFVWRQKAVEPTDLTNLPSLFTHECRTIWITGGLGGLGYQIAQYIGTKTGAQLVLSGRSVLDADKEAQLDSLRKRGIKAEYVPCDVNNYAALEKTMLLIRQRFGALHGVIHCAGVIHDALTINKTEEEIDHVIATKASAACLLDEVTQHEPLAFFVMFSSLASLGNIGQIDYAAANAFLDTFAEYREDLVQQKQRSGKSLSINWPLWQEGGMNVTPRVAKHMFDTFGIVPLDTKTALEILEIAIRSPFSQFGVMKGNEQKIKDYLRLSDDSLPVTPLSVSDHKDSDITFNDKNMDSVNPSESDKSESGNLSAAIADIAAGKLSELLGMRSEAIDIHRQFGDYGMDSVGLIELAEYINSRFGVTLSQASFLEFNTLNRVAEHLIQLLPEPSIPVPSDILPSDTSSSDIPDAVSTPSFAIVGYDCTFPGAKNAHAYWQNIVQKNISIQGITQEKWQQRHILTPSDKEDAVKRMQLFGFLPDIDQFDAEFWGIDAETAKQIDPQQRLLMQCIWRCVEHAGYDLEDFTQRKVGLFVAADSTDYKSLIKDHSLINNIEGCGGLQAGLSLGMMVNQISYFFNFTGPSEVVDNACASVFVALQKARQAILQGDCDVAVVAGVKVILDFMEFYIRDQGGILSQSGKMAPFDYTADGYIRGEGVGAVMIKPLEQAHLERDPVRAIIRGIGISHNGRSAFSSMAPSVEKQEENIKKAYQTAGIDPLFC

SEQ ID NO: 4400 - protein, 2973 aa, Xenorhabdus sp.
MTDKMTWLLQHPYAEFVLGLKAAWEDDLSSDAFNNLFAQNCVCHMQSNELNDAQAFQTFIQSVRLNTANLKLIPESVIIQDDILHLFHRWKADRWHDEIISGGEYSNFCQIAIRINDGKIVELWQQVQDFLFLVGMPLSEACLSYPAWQQRVLVNKEKEGLHVASDEQSIRMSEKAKQLVDCVFNQGSLRHIDSLLHPELVFHNGNVTGHGIAEWKSFIYALRTAIGKEGVTLFDELFIRDENTLTLFVRMELTQASPFVLSRLNGMFCVLKLEMDEHRITKIQTYPENYLFFLGIDFPQHETRLKQLFRGNRLPLEIKSQPKHEAEIKMPPFSESVRNEQVAIVGIAGSFPQADSVDQFWRNLLEEKSGFSAFPEDRPWLSAGTIIRSAGFINDIFRFDEQYFQIPPAVAQYMDPQHRLLLEIINQSIEDSGHANQDVSGDRTALFVSALANDYEKLLRDKGVEENFYYWAGNEPAMSSGRIARFLDIQGPTQFINTECTGGTTALLGACDLIRSGQVDQAIVSASSLFLHPYGFIAREDGILSSAAAPELFSKRSKGQLRGEAVVSVIVKSLSKAQQDGDDIYAIIAGGAANNSGRTFSLISANVEQQAKTISKAWQNSGVSADDFSVIECNASGVRAGDFTEITALKKVFLPHQHIHLSTVKGAIGHTEAVSGLVALVKVLLQLRHQTIIGTQGLSEIDDSLGLEGSGLYLNHHHQKWDSTIREGEALPRIAGINSFAGGGYNTHVVVKEFIRQENTSVKQATMPVLVPLSSHSEASLRDHIVQIKRYLQERQLQKQEVDLARLAFTLQSREARQYRVILEVSHLSELTSQLDGVLNGDIGIKNTEAIQQEDTLRSVSPSCLTDEITTELILRWLRGEEPDWSCLWGNKHPVRLSGLPVRAFLGAIHRPPFFIDASATLSNNALKSCQFRVSTAESYLHEHVVNGQMMLPGVVHLEFVRHATTLLLPDYAAKKQLSLHNVGWAKPAIKTEAETALMLTVNIKSETSPEEKNNIHFDVTSGDSVLGTETSEEEHRHPDSLTVGSISFSSLQNSTSLDIKQCQQSCQERRLTAAQCYSVLELLGIQIGKKHRAIQEITIGKNSHGETVALARLAFVADKAPMYEFAHQSMPFKSKPFMYCPAVMDGALQAAYLGLLTQEDLKQGVITPLPFAVDEIRFIRQVKGEAWAWMTNVASPVSPSFIKKMDLVICDNNGDICVEIKGFSIRELRASVTPSTVVQTDISQIEHAQNQPRPEDIIGQLKAIIGKELGIPPTRLRTSEPLDKYGIDSAIAIQLVAILEKTFGSLPKTLFYEYKCIADIAQYLAQTVTHHADKSLLSLDQKKESDLANQGQNIPDNRLNIAIIGISAKYPQSENIAQIWDNLKQGKRCISEIPQNRWDWQNYYRGDSQNTHLSKWGGFLSGVDEFDFAFFDISESEAAAMDPQERLFLQEAWKAIEDAGYTPETLAADEKREKNGINAVGVYVGSMYSEYQLNDVTSDDLKQPIGLVGSQASIANRLSYFLDFHGPSMTLDAMCTSSMVAIQLACQDLKQGRTHAAIVGGVNLTLHPNKYLTLSRRKMLSSSPELNSFGEGSHGYIPGEGIGVLVLKRLEDALNEGAHIYGVIQGCAVNQNGRSNGFGAPDPKAQQVVIEQAMTEAKVNVDEISYLEAHSTGTRYGDLIEVGALTKVFQKRADNHHPACLIGSGKPNFGHCEAAAGVGSVIKVLLQMQHKMIAPTLYGERLNPDIIFEQTPFSVNSTLMEWKQPGREGMSIPRIAGISCFGAGGTNAHLILEESTSPELSETGINLPCAILLSAKTVSALQDRVKQLYDFLSLYQFENSTHETELLLMRLALTLQIGRENMPVRVGFLVQSLEDLCQQLKQCECSNENIIVLSSIDQFEEREWQEKINGWLVENNQRELLYVWCKGANIEWHQVYREQLPERISLPTYPFERHKIELKAIETVPSLSASVQTAYLYGEDGFAFLSNRTMTFREKAEQFVIKTLENIIEHKVPSANTPFSDLHLTSLHIVRFLDFWQVVFGVSLQFTIFYEQRNVRSLVDDLITSEWITEEQLLTAAEFFRSSTEENAAHTFPLSELQESFVIGRALSTYGQRVGSTLYFELHIAQAIPIKQIESAWNHLVDHHESLHTVVNNNFQQQVLEDYAYYSFPVIDLSEYSDSEKTDYLTNSRTTLNCKVFDLACWPYFEINALILDAEHTVVQIVLDEVIADAVSVFLLVEQLRYMSEDPDYELPATYSLKKYLTLVEQIRTGKHFQQSMQYWVDKLENIPPGPDLKYLPAQYPVAQTVHCLSAELPSELWSAIKTQADMLSCSTGAMLLSIFCEVLHQVTEQSRFSLNLTNFNRLAINQQISGLVGLLANSNIFVSEWEPENTFQSRIIACQQQLDRDASHSFVGAVNVLRKLRQNPAKRADICLSVVFTNLISAAFQQPNPEDGWSVQHMMNTTPQVALDHHVFEVNGRLVYRWYVAHALLEQGSVVALFDLYRQKLIDRAQSISETSVSGEQKRQDLESLEKEKAQSSFFPLLGIQKALYAGQMMPVKLGGKTCCCHLEFDIDVLDISRLTRAWNEVVAYHPVLRTHYLASLHQKVLDNIADYTILTDSVIGTEAIFHQRCHAIRNEMLLTRYSAGEYPGYRLRVCTLEGQKNRLFINFDFVLIDGKSIFLILSQLFNKYKSESYRLSTQNITFQDVVLHYKHQQNTANCITARDYWHDKFSRMKQGLNGLAPLAHQTSLPAPLTQVLSYYRQIQALAEKLSVSVDSILLAAFGFTLLNWNKLKTGSDEPITIAVVSWDRYAGVPETTTGVFTRLSWVSFSETDQTPEQLILRVQAQLDNDRHHDVVDELEIAAHYPDLHFPIVYTCLLAYGPDFPEPAYSISQTPGVVLDNIPTVLNTSSLRLQWDVLESGRNEFSSVFQQYCACLKKWFFTDEMLNFGHQGKDLADYDVRNSATVDGMPS

SEQ ID NO: 4401 - protein, 298 aa, Xenorhabdus sp.
KNRQERVSAILSVITEITGLQPENIDLKMRFSDMGIDSIAMQGITRELSQITGMMINSVVLAQNPSVHALVEYLSQDAEKSGNEDDLIQKKTELHASSPRDFDEKDVGVIGIDLRLCGAEHWRDAWPLFSQKILMPEIYPEARWQMLPDELTRNIEREKIQGYFMKDSLAFDYKFFGLSRREAMLMDPQHRMLMESVWSAITDAGYSPEQFNQRKTAVFVCIDANDYALIAEFDSSIDEFSVGASTPYLSANRLSHLFDFKGPSETLNVACASVYSAVEKAKALINSGVVIKQLFFRA

SEQ ID NO: 4402 - protein, 332 aa, Xenorhabdus sp.
RNYITPNIAEAARAGVTTYAIGAVIKTATIGETSANTAKFNLPDRQVPLRVLLAKEDRDNLAVLRNMYVSSTSGVNVPIKSVADITFSSGPDAIERISRQRKAVIEADLDGIAIGTALEQINQLSTLEKLPPEVKRIEYGDVEYMNEMFERFFTTIMLSILMVLAILIILFKDFLQPVTILVALPFAIGGAIIALLLYNATIDMPVIIGFLMLMGIVSKNSILLVEFILEKSRSGMSRNDAIIQAGKERVRPIIMTTIAMIAGMIPLVLTSGADTNFRAPMAIAVIGGLLSSTLLSLLFVPVIYSYMDDFKNYIIPRLRKLSSVTKDDLNYH

SEQ ID NO: 4403 - protein, 348 aa, Xenorhabdus sp.
MYKNTIHNIIPPNLFEYIIKNCDENNKAPILKALNHTYNLMNYYAGIGSSSLIYNPGDDENLDRIIYDAENTDKYPGTKTIRTEGSSESKDICVDEAYEHLGITYQFYKEIFGRNSIDNKGLKLVATVHYLENYANAFWADNQMVFGDGMKSYLNRFTSCIDVTAHEMTHGVTQYEANLDYAYQAGALNESISDVFGIMVKQFSNNQKAGESDWLIGQGIFGPKMNPNNDPNLALRSFKAPGTAYSDDDQIGHMDQYEDLPFSNDNGGVHKYSGIPNRAFYLLATALGGYSWEQAGKIWYSTLTDNNLSNKANFDDFAKLTVSNACKLFGKSVSNLVTDAWHQVGVLR

SEQ ID NO: 4404 - protein, 1049 aa, Xenorhabdus sp.
MPKFFIERPIFAWVIAIITMLAGLLAIMKLPVEQYPAIAPPSIVISATYPGADAITLQNTVTQVIEQNMNGIDNLVYMSSNSDSAGRTSITLTFEAETNADTAQVQVQNKLQQALPLLPQEVQQQGVSVEKTTSSFLMVAGFISENNTMSQEDISDYVGANVKDSLSRVAGVGEAMLLGTQYAMRIWLDPDKLVNYKMTALDVMKSIKEQNNQVAAGQLGATPSVPGQRLNVSIIAQTRLSSPEQFSRILLRVNPDGSKITLADVATVELGAQHYGFLARFNGKPASGIGIKLATGANALDTSKAVKKALSEMQPYFPHGLNVVYPYDTTPFVKISIFEVVKTLIEAILLVFVVMYLFLQNFRATLIPTIAVPVVLLGTFAVLAAFGYSINTLTMFAMVLAIGLLVDDAIVVVENVERVMQEEGLSPKEATKRSMGQIQSALVGIALVLSAVFVPMAFFGGATGAIYRQFSITIVSAMILSVFVALILTPALCATMLKPIAKGSHGIQTGFFGWFNRLFEKSTHHYTDSVGRMLRGTRRYLLIYVVLIAGTALLFIRIPASFLPEEDQGVLLAMVQLPPGSTQEQTQKVLNEINDYFHTNEKDVVQSVFTLNGFGFAGQGQNMGLAFVSLKDWDERKKDKDKVPAIVNRANIRFSQIKEGMVFAFNIPSIVELGSASGFDFQLIDKGNLGHEALTNARNQLLGMAAQNSDVLTGVRPNGQNDTPQYRFYIDQEKAEAQGVSINDINITLSTMFGGTYVNDFIDRGRIKQVYVQADARFRMLPKDIAKLYVRNFYGEMVPFSTFMDTTKEPWIYGPPRLERYNGLPSMEIVGEAVLGKSTGEAMALMEKLASQLPAGIGYDWTGMSYQERLSGNQAPALYALSLLVVFLCLAALYESWSIPFSVMLVVPLGVIGALLATFMRGMDNDVYFKVGLLTTIGLSAKNAILIVEFAKDLMEKDGKGLIESTMEAVRMRLRPILMTSLAFMLGVMPLVLSNGAGSGAQNAVGTGVLGGMIAATSLAIYFVPVFFVVIKRRFSKKNEDTEHISSSH

SEQ ID NO: 4405 - protein, 399 aa, Xenorhabdus sp.
MLKNRGVLPLATLLVLSGSFILSGCNDNQNTQQRAAGEQAPEVGIVTLKAEPLTVITELPGRTSAFRVAEVRPQVSGIILKRNYKEGSDITAGESLYQIDPASYQADYNKAKANLARATANENVGHLTVERYKPLLGTQYVSKQEFDKANSDYAQAVADVQSAKAALESARINLAYTKVTAPISGRIGKSAVSEGALVSAGQTTALTSVQQLDPIYVDITQSSDDYLRLKNEIAKGTIQRENGKPKIHLVTDTGMEYSRTGHLEFSDITVEETTGTITMRAVFPNPNEELLPGMFVRTKLEEGVRHNAILVPQQAISRTPRGQATALIVDKDNKVELRYLKAPQAIGNKWLVTEGLKAGDKVIVTGLFKAAPGATVQPTEVDLDAKPETNKTESAKKSQ

SEQ ID NO: 4406 - protein, 195 aa, Xenorhabdus sp.
MVSLSKNQSVSLTKQSTSLAKIDFGLGWDPVAQKKGFLSRLFGGDSNEIDLDASCILLDASGNSIDIVWFGQLKSECGSIRHSGDNLTGEGDGDDEVISVDLVKLPANVEYLAFTVNSFRGQTFNDVENAFCRVVDQNGKELARYQLNEQGAHTGIIISSLRRNNGMWDFTAHGVPCRGRTIDDMYPQVVETVVR

SEQ ID NO: 4407 - protein, 356 aa, Xenorhabdus sp.
MVSTHIGFPMETVAVFIILSVGALFIDLFMHRHDKPISLRSAALWSVFWVAVAFVFAGFLFVHHGAEVASLFITGYALEKVLSVDNLFVIMAIFSWFAVPDRYRHRVLYWGIIGAIVFRGIFVAIGASLLTLGPWVEMVFAVIVGWTAVMMLKSGDNDDEIEDYSQHLAYRLVKRFFPIWPKLHGHDFMLTQKEVDAELAKPENADVTIGRRTSSNKTNSEKAGRVGKAALYATPLMLCLAVVELSDVMFAFDSVPAVIAVSREPLIVYSAMMFAILGLRTLYFVLEALKKYLVHLEKAVIVLLFFIAIKLGLNASEHMFHHGYSISATTSLFVVLGVLAAGIIASLMFPEKEKTS

SEQ ID NO: 4408 - protein, 192 aa, Xenorhabdus sp.
MGVSLSKGGNVSLTKEAPTMKNVLIGLGWDARATDGQDFDLDASAFLLAANGKVRGDADFIFYNNLKSSDGSIMHTGDNRTGEGDGDDESLKIKLDQIPADIDKVVFVVTIHDAQARRQSFGQVSGAFIRLVNDDTQAEVARYDLTEDASTETAMLFGELYRHNSEWKFRAVGQGYAGGLASVCAQYGINAA

SEQ ID NO: 4409 - protein, 209 aa, Xenorhabdus sp.
MSQGNNNQKSRPLDVIRTVKKSAINHWQSLLLACGVDVPAKGKHGVCPICGGTDRFHFIDDNHHGDWHCRQCDEPNYGDGLDLVARTKGITVFAAAKLVADALALSLPEPKSTKEQPRTVKPIAERITELVATSVTGESQYLTKKGLQCPNQRLLKDGSLLLVVQTLDGTITGGQTIKPNGEKRLVLRDSKKRQFYSCPREDPNTRHFH

SEQ ID NO: 4410 - protein, 85 aa, Xenorhabdus sp.
YTKAKNRSDGTMTPTVRKMRVDANTSFRTALKRAGIDNFRFHGLRHTWASWLIQAGVPLSALQEMGGWESIEMVRRYAHLAPSHL

SEQ ID NO: 4411 - protein, 193 aa, Xenorhabdus sp.
SMADRPILFSAPMIRALLAGTKTQTRRLIKPRGKHRPSLFDGTWSDSYVLDHGNESWRQVDIPIKLGDRLWVRETWAPLSALTHNDPGVQALADGGFYRADGGTVDGEISKWLPSIFMPRHASRLTLIVTDVRVERLQDISEADADAECFGGNYPGDVLPEVFHGDREQYGHLSMAQCYGRLWNHINGAGFRA

SEQ ID NO: 4412 - protein, 112 aa, Xenorhabdus sp.
MYLGMNRQTGRALSDLDHVRQSVSDILLTPVGSRIARRTYGSLLPELIDWPQNPAIKLQVMAASYTAISRWEPRVTLTSITMETLQDGRMVVDITGTYHQSAKEFSLSIPVR

SEQ ID NO: 4413 - protein, 133 aa, Xenorhabdus sp.
VLPAIFSDEFPAPSTSPEATHVQFPDGAVMEYEPQSGALTVTGIKTATVTASDSVHITAPEITCVASTRITLDTPEVICTQLMSTGNLIVRNGGKMTGNIEHTGGTFSSNGVIVDSHKHIGIQSGRDTSGGPV

SEQ ID NO: 4414 - protein, 258 aa, Xenorhabdus sp.
VFSRPRKISASTVIIRLIRALSPPRCRVTWDAASSAVVYEVEWRKDNGNWITAPQTTARRLEVPNVDEGRYQARVRAMNAAAISSIWTTTRDTLLERHTRPPSEPQSLQTTPLLFGIRLDWAFVKSTNVLLKTEIGYNKSGEEDDTLQFADIAYPQRTYTLQGLAAGEKFYFRARLVDKSGHASEWTSLVSGHASTDTRWIVEASRDHFLDAKTGRRLQEQLAEQARVDARYKQSAAENAQAIERLQDMLKDLQQRTR

SEQ ID NO: 4415 - protein, 291 aa, Xenorhabdus sp.
MGEAASPAQVIHRDVLRWRRHLLVEKKQSSHTWNNKVAHLRAIFNFGMERKLLPHTENPFNNAVTKKEKKKKKILSQSQINRINLLMGKFAEEERVEMPPRGGRCALYPTWYWSTVLATLRFTGMRQNQLLHLRLRDINLDSNYIELGLEGSKNHSEWEIPIIPPLKRRLTKLVERAVAAGAKAHDPIFDLSRLSVPHPSRLSRYQYDINREKQQLRSFFRRLSKECDFAVSPHRFRHTLATTLMKSPDRNLPLVKRLLGHRNVATTMEYIDLDMEVTGKALERELGLYTD

SEQ ID NO: 4416 - protein, 84 aa, Xenorhabdus sp.
MEQHQIQGSKGGSDSPRTPVESPDSLQSTSYAKILLALGEGEFAGGLDGTNIFLDNTPIIGPDGKSNFEGVKWEFRHGTPYPLE

SEQ ID NO: 4417 - protein, 456 aa, Xenorhabdus sp.
PDIYNPTARSYSGVWSGQFKWAWTDNPAWVLYDLMINDRFSIGSRVKTENLSLAKWDLYRIAQYCDQSVPDGKGGTEPRHTCNVYIQSQEEVWTVLRDIAGIFRGMTYWANNNMNVLADMPRDVDYLYTRANVRDGKRLQEQLNYQAEAELINSTAIYQNARNLIVKDGENKAEIRRLDRVFADEKAAWAESFKEVKADLVVVKDEVRTEVKASIQESQKAIAKMDKALAESEQRTQVQFKQQSALIDTKATAVFDHKGGSATYSVRAGIKDADGNYHGAGMVIGAQMVDGQVRTDIGFNANHFTFLNPVNGKLEPFMAAKNGQLFVRHGFIEDGSIDNAKIGNYIQSRDYTAGQTGWKIDKGGSAEFNNVTVRGTIHATNGTFSGTINGADGNFSGTVYASKIIGDVVSVTLGNVSMGRNTHVFFHKRLNDPMPFDRVFFYGPIMTQIYTSNFRA

SEQ ID NO: 4418 - protein, 249 aa, Xenorhabdus sp.
MEKRGATEKLKKVRQRCGEVWKYAIITGRAEYNPAPDLASAFIPHKREHYPHLDVDELPEFLKSIDKHMGSQIVRHALRILIITGLRPGELRKLEWSEVDLEKRLIQIPAERMKMRRPHSVPLSNQVITLLQQLIPISGDYQYVFPSRTDYKKPLSEMAMNTMMKRMGYGGRATGHGFRHTMSTVLHEQRFPSEWVELQLAHVDKNTIRGTYNHALHLDGRREMLQWYADFMSSLESGKDITNSRFKND

SEQ ID NO: 4419 - protein, 58 aa, Xenorhabdus sp.
MFRCPICKTNSHTRSSFWQTEETKERYNQCQNINCGTTFVTCESFIRVISKGNNIHKV

SEQ ID NO: 4420 - protein, 261 aa, Xenorhabdus sp.
MSKKNEVITNNQAAMMSSREIAELTGKKISAVHSDIRAMVPALYAADNGEKVRSYAWGTTKDEMIAFLNHHKIQGIEVIFDDRGYVYEFLLDRRHTEILISGYDIVRRAAIIDRWRALETGQAQPIASKATPHLSKLEVLQMAIESEQGRLVEKERADKAERTKSQISRSREASALGKLSVATRKCRELEERLGESTKHSTITSVFRATEKEYKYAALRKWCRENNMEATDVPDPRYGSVKSWPAEAWLAVYGVDLKKLFG

SEQ ID NO: 4421 - protein, 54 aa, Xenorhabdus sp.
LLRHMGWFEAADLIVKGMEGSIAAKTVTYDFERLMEDAKLLKCSEFGDAIISHM

SEQ ID NO: 4422 - protein, 543 aa, Xenorhabdus sp.
VEKSLTRVQNSFMEWVGDVNKATGTTRVLAGTLDDLSKNINNVAAAGMVVAGLFGAKAIGNRLTAIQASTSALIQNSRAEINNADQAYRNAQVQVANARATELQAQRNVLAARSRLLQTTNDQQFTAAQLRLNRAIEAEAKAHAVVTQSIAARAAAQSRLNAVTSLGQRMGGALLGAVGGIPGALILAAGAAYLLYQNQKQAKEEAREYANTIDVIKNKLEGLSLIQLSDETKKIKDVIEVVKNDLESLKADLEVKVSQLKDAKSLANSPTLAARWKQSPEFFKKSAVNLEQDILILKEKINEKEAKSIELNETLASLQEKFKSKAVESAEKERKIVAAISEARRTGNVTIALQNQKLEYTVEIMERLKRAAIDVSGLHIPVPEVKFEPNDKLKALLADQEREIDLSRRKGLDKAQREAHYKAIDAGLNPNDRQQKPYVDRMVNNATQIYQNTEAMRKQDEAAREARNAAERATQKAARAAEDYAQKVAELNTQLATEAVRYQEGNTAAERFAAAQGNVTKFTQAQNTQLNLLNQKLEEAKQR

SEQ ID NO: 4423 - protein, 387 aa, Xenorhabdus sp.
MSITQRNGIWHCHFFTPSGKRVRKSLGTRDKKQAQELYDQLRAEAWRVDQLDDLPTRTFEECCIRWLREKEHKRSLDDDKTKIEFFLQHFSGRDVSTITADEIYDAVSNMKNRKHYQIWESKRDAALKKGEKPPVYEAIPVSQATKSQHLSFIRSLLRAAANEWNWIKSAPVIKTKKPVSKRIRWLTKDEAARLIECMPESIKPIVIFALATGLRRSNIIDLEWQQVDMQRKVAWINPENAKAGKAIGVALNDTACRVLRDQIGKHSRWVFVHTKAKHRPDGTLTPAVRKMRVDDNSAWNIGLKKAGIEDFRFHDLRHTWASWLIQSGVPLSALQEMGGWESIEMVRRYAHLAPNHLSEHACKIDVLFEDNDTNTTQGKNQAGLRLA

SEQ ID NO: 4424 - protein, 131 aa, Xenorhabdus sp.
MTRINLIQPSELCDQHLLAEHRELTRIPNEIARREGNVTLSTSEKYLLGKGHVIFFRDKLLFLKKRYEAIHQECLNRGFSVVNRWPESVSVYHHLWNDYQVTEEDISVNMARIKERMPIKARFSPCFDKKI

SEQ ID NO: 4425 - protein, 90 aa, Xenorhabdus sp.
MKNDFEIRTASLSANDKKLTGYVIKWNSRSHILWDEFAEQFAPNAFSASLTAGADNEFFGEHKRPNYHATQFPSSKRQHALVATLSDSVL

SEQ ID NO: 4426 - protein, 367 aa, Xenorhabdus sp.
FTSSHFIVDGNQFMKKLLELRQQKADLTQQMRSLLTKPENEKRSLTADEAKQFDELRSQSDNLNTEIARYESLSDEERSQAKTQPTSKALSNHELRHYILTGEARSLSTSIPSDGGYTVIPELNKQIMQQLADESVMRRICTIKTTRSNEYKQLVSVGGAAVIHGEEGKARGETATPKMEEVSIKLFPIYAYPKTTQEIIDFSDVDILGWLTSEITDTFVDTEETDLVSGDGSKKAKGFLSYPRDAQADRVRTFGTLQKLEATQLEADNLIDLKFMLKNKYRKNAVWVMNSTTAANVQKLKNGMEITSGANVCKRVILICCWACLSTISNLCRITSSVWATSNAVISLLTIKRASALVPIYYRAGIL

SEQ ID NO: 4427 - protein, 140 aa, Xenorhabdus sp.
VSPEHYSQWLVYWQAYQDFYKVDLAENITERTWARFFDVKEPMHCAVALESGKILGFVHYLYHRATWSETDFCYLEDLFVSPEFRGRHIGKKLIEFVQHEAQKQHCGRLYWHTHETNLRGQRLYNWVAEKSGMIEYRMPL

SEQ ID NO: 4428 - protein, 316 aa, Xenorhabdus sp.
MKKLLALLLLTPLLISCSSKKNIEYKEEYIKDTNGFDILMGQFAHDIENIWGLREVLIAGPKDYVKYTDQYKTRSHINFDAGTITIETISPIEPNEHLRKAIITTLLMGDDPGSVDLYSDTNDIQISKEPFLYGQVLDNAGEPIRWEWRANHFADYLLQNKLQRRQSGLHVIWSVTMQLVPNHLDKRAHKYLPIVRKAAIKYGIDESLILAIMQTESSFNPYAVSRSDALGLMQVMQHTAGRDVFKMQGKSGQPDRNYLFDPENNIDAGTAYLAILQNVYLGEIQNATSRRYAVITAYNGGAGSVLRVFSSDKKKA

SEQ ID NO: 4429 - protein, 129 aa, Xenorhabdus sp.
NLYRSGYKKQLGINNDQLTEIQQLTDRINYQNTRIDMLHELDSKHTQELANAKTEINTLRADIAAGRRKLRIKATCPVREATSSGSVGHATTVELPRETGQAVLDIREDIINDRAKLRYLQEYVRTQCG

SEQ ID NO: 4430 - protein, 170 aa, Xenorhabdus sp.
MLAVNEVARKNAKSTLSSGIGLYMTGADSEGGAEVYSAATTRDQARIVFEDAKSMIKQARPTLGRLFEFNKLAIYQEQSSSKFEPLSSDANNLDGLNIHCGIVDELHAHRTRDVWDVLETATGINCFCSQRFQTLNDLLHQNIRGRGTGSDANSADIINPLFFNIFGRIN

SEQ ID NO: 4431 - protein, 115 aa, Xenorhabdus sp.
LPVIAGVEITTDSEGRFNLNALHRASGTGEEKSPAKFFRNKTAKELISELESQTGQICLVSSEGKFGGTFAHELLAVSYAGWISPSFQLQVNQTFIDYRTGKLAPTEPEKSKSGL

SEQ ID NO: 4432 - protein, 245 aa, Xenorhabdus sp.
SVEHMIPIMHNNVPVITTELLADVYETDINNIQQNFKRNKGRFTEGKHYFKLTGLILKEFKNRLTVSQSVNKHARNLILWTERGAARHAKMLDTDKAWDVFGKLEDFYFNLKGVETKTTTYDRTPLRGLVNTLMGKYGISDRTLFQMVHREFGVNHIDELSHDQLPSAIAYLATKVIEGEFLGKEALPVSQQIRYTVKLEIYDNHFNQVDRLTNRMDTPEGIIQGVAKLYGYYIDKMVSMPDNAL

SEQ ID NO: 4433 - protein, 82 aa, Xenorhabdus sp.
MIKCPLCNQSAHTRSSFEHSSQTKERYNQCQNINCGATFVSHETFVRFISKPGDVESVTPHPRAKTKRQPRQKAAPQAAVTQ

SEQ ID NO: 4434 - protein, 143 aa, Xenorhabdus sp.
LPVGVPIPWPSETPPDGWLKCNGETFDTVKYPKLALAYPSGRLPDLRGEFIRGWDDERGVDTPRQVLSWQQGSYLVQEINDRVDNVVNFSLDDRKDLNWDIPNEEIHLRGRSVGANGTWPVDKRYVGVTRPRNVAFNYIVRAA

SEQ ID NO: 4435 - protein, 578 aa, Xenorhabdus sp.
LTVSQLHEGVVLAAIDESNLFTIAEQVRTQWPNAEIILAADNDWHEPEERDKNGRLKKNVGKIAAEKAAIAINGWVTLPPTALKADWDDYRQQHGIEAAKQAFSEGLYQVGEKKVETANVISINPEKQKKKRTGNNLAQLADNEKALLLTERYEGIAIHSESEGFYTYQSGVWKKTSFLDLSREMGKVYTLHGTNFSKRALNNVVEALKIVAPVLGEPCQSMIPFANGVFDIETKVFSPHRPENWLLNHNGIEYTPAKPDENLRDDAPNFHKWISHAADRDPYKMKRIFAALYMVLANRYDWQLFLEITGEGGSGKSVFTQIATLLAGQHNTASGNMAALDTARGRAQFVGKSMITLPDQPKYTGEGTGIKAITGGDAVEIDPKHEQQYSEIIRAVVIATNNTPMIFTERAGGVARRRVIYQFNNKVKEEDKDPHLSEKIAHEIPVIVRRLLATFDDPEQAKVLLLEQRDSDEALEVKRASNPVLDLCAALAFMGEPRGLEMGGGRKTEEERQPKRYLYHLYLSFMEYQGLGRPLSVTEFGKAVKEAAKEYKAEYLTRTIKGRRQTNVQLTDKADEFI

SEQ ID NO: 4436 - protein, 148 aa, Xenorhabdus sp.
FDFYRVSNLGRIHSLHSNRVLKGKIHYSGYHSVKLSLNGVITDFSVHRLVAMAFVPNPMNLPGVRHLDGDILNNQASNLTWSSASNGILNSAILAISTATGSHLVFVGKNDLLAAGFDSSAVYACLNGRAKTHKGYRFERIALEGKSC

SEQ ID NO: 4437 - protein, 127 aa, Xenorhabdus sp.
MKTMRERIKQARLAKKMTQADLAEKIGVTPQSVQQWESHTEPRKAKLMELAEILGVDVNWLLFGDPSKKDGIRVEQIASQEVTAWDSTSPLDNNEVEVPYYNSIELAASHACNGGAESSGYKKLEGT

SEQ ID NO: 4438 - protein, 474 aa, Xenorhabdus sp.
VWSDTSEAFNQNRLSEVKTMADTQHTQTRPEFTAPKKSSNQKPLDLIQTVKTSAMYSWQNLLPACGITVPAKGKHGACPVCGGTDRFHFIDDHHHGNWHCRQCDAPNYGDGLDLVARTNRLTIIEAAKVVADALALPLPEPKPAREITYPTPPIVESVAALMAQTITGKSPYLTAKGLLCPNQRLLPDNSVLLPLTTLDKKITGAQIIKPNGEKKLLSVSQKKGAFIAVSALEVSPDTVIIAEGYATALTVNQLYQGSVLAALDAGNLFSVANAVRERWPDVKIIIAADNDWHSPGELDKHGKPKVNTGKISAEKAALTVNGWVTLPPTEHKADWDDYRQQHGIEAARQAFSQVLYPVREPISSDAIETRRYDNVESLYPNRKTKLPLSIGSEGFDAQLDYVVKGIIPAHSLCSIYGASGSYKSFLAGAWGCHIATGKAWAGKSVAQGAVLYVVGEAGSAEEPPKVTILSTVTP

SEQ ID NO: 4439 - protein, 238 aa, Xenorhabdus sp.
HYNEDGLSKGNAPGGTGVNFSGHSYYTFAPEKAWNYELFARGKAINNRLLVTSNIFYTDYKGFQSAVDDYREDKSNGSILVNADKAVSYGVELSADYRVLDNLSLNSGLGLLHTEIKKFADYRGNSFEGKHFSKAPGYMFNIGADWNITEQFRLSGSLRYVDHYFSDDQNDPELRVSSYSVSNLRFSYNPTNNLELFAYGNNIFDRRAPTNKYHDRKAGLSGNMLEPREVGIGAKMSF

SEQ ID NO: 4440 - protein, 443 aa, Xenorhabdus sp.
MKTKAILFASVLLAGCQSGLQPKSPSQQHTQKMSSTNQKTNGIAVPEETANWKESPTAQQDLWGHIRDELKMEIPDNNRVREQQNYYLKHKSYLQNVALRSEPYMYWIVEQIDQRNIPMEVALLPIVESAFNPHATSYANAVGLWQIIPSTGRHYGLTQDKWYDARRDVAASTTAALNMLERLNVRFNGDWLLTIAAYNSGEGRVARAIRENQSKGKPTDFWSLELPRETMHYVPKILALSNVIRQNEKYGFTLPKPNIQQALAKVEVGQQITLSQAAELSGLSLTSMKAYNPGYKQGMTSPHGPHYIMLPKENAGQLKHSLADKSVLKEISLAVAKNLRQLHQQSHYTVRSGDTLSAIAKRFKTSHYQLQKLNGLKTADRLKIGQVLKVNISEPIKYQVRKGDSFTSIAKRHGVNLNDLMNWNKGIKLKDMKPGLALTLYLN

SEQ ID NO: 4441 - protein, 192 aa, Xenorhabdus sp.
DNSLEKNNLITPLFHDKLFQSRSIIISGEINQQLVEKVITQLLLLQELNNNPIKVFVNSQGGHVESGDTLHDMFKFIQPEILMIGTGWVASAGITLFLAAKKEHRYCLPNTRFMIHQPLGGVQGRATDIEIETKEILKMRGRINQLISEATGHPIDKVAKDTDRNFWMGPEEARDYGIVGQIISHWSELKVG

SEQ ID NO: 4442 - protein, 99 aa, Xenorhabdus sp.
MKKQVRRKCKICREWFHPKADHIWWCSPEHGAELGMRQQDRKYERAKQKLERERRQKEVANRDKLKARKLAVKPRSYWIQQAQRAVNAYIRERDRDCRE

SEQ ID NO: 4443 - protein, 216 aa, Xenorhabdus sp.
HYLKIDGDQYHRIFVVGDLHGCYQLLMDKLQQIDFDYKNDLLISVGDLIDRGDRNVECLDLITQKWFRAVRGNHEQMAIDALFHNGNSDLWFNNGGQWFLSLDAEQEILAKDLLAKAEQLPLVIEVDTGHKAIVIAHADYPDNEYEFGKLVNWQSVIWSRDRIYDATGSGIGREITGADLFIFGHTPAHDDAQYWNQRYIDTGAVFGYGLTVEQIK

SEQ ID NO: 4444 - protein, 102 aa, Xenorhabdus sp.
SDRIASGYGATTQQITNNFNRNKSRFIEGKHYHRIEGNEVEILRNSFRGVQISSKARSFYLWTERGAANHSKMLETDQAWDYFDDLTEFYFTRRDSITTEAE

SEQ ID NO: 4445 - protein, 212 aa, Xenorhabdus sp.
KVNERALSEDELVVLFQVINSSRYNPRDTLIIKLCLLFGCRIGELLKAKVSDFDYEKNIWIIPPKNHKTGRKSKKPIIRPIIPVAKELIEQAKRLNGGSEYLFVVGSGNPFLPVGGHASIMTMLNKKMSLHFPNCKPFSIHDLRRTMRTGVSELTAPHVAEIMVGHKLPGIWQVYDKHTYLNEQREAYERWWDKLTKTVSRPPSQEYPVVEN

SEQ ID NO: 4446 - protein, 408 aa, Xenorhabdus sp.
PKEKTYKLADGGGLYLEVTTRGSKYWRMKYYRPTDKKEDRLAFGVYPAISLADARTKRDEAKKLIAQGIDPKAEKKDAHAGAKGKHTFEKVARDWHASNKRWSEDHGNRILRSLEHYIFPHIGRLDISTLRTSQLLAPIKTVDADGKHDIAQRLQQRITSIMRYAVQNDILEFNPANDMAGALSTVKSQHHPALPHERLPEFLSRLSRYRGRLITRIAVELTLLTFVRSSELRFARWEELDLENTVWKIPATRKSIEGVKFSERGMKMKTEHIVPLSRQAVVLFKSLRELSGDCEVMFPNDHDPQKVMSESTVNNALRGMGYDTKTDVCGHGFRTMARGAMGESGLWNDDAIERQLSHVERKNVRAAYIHTSKHLDERRLMVQWWADYLDANREKHITPYDFAKKRRK

SEQ ID NO: 4447 - protein, 812 aa, Xenorhabdus sp.
MADTQHNQTRPKFTSLDKSDSQKPLEFIQTVKQSAMYHWENLLPACGIDIPAKGKHSACPVCGGTDRFHFIDDHHHGNWHCRQCDLPNYGDGLDLVAKTNRLSVLEAAKIVANVLALPLPESKPAKEITYPVQPIAERVAALMAQTVAGPSPYLAAKGLQHHNQRLLEDDSLLLVLTALDKKVTGAQIIKPDGEKKLLSGSQKKGAFITVSVLEKNPDTVIITEGYATALTVSKLYKGTVLAALDAGNLLSVTKAVREHWPDTKIILAADNDWHHPDELDKNGKPKVNIGKISAEKAALAVNGWITLPPTEYKADWDDYRQQHGINAAKQAFSQELYQPVPVKKKSATQSNDTEPSKLTLCQMGASQRGEVLLARYNGDLALDGASETVHHYDGIVWRPVSDRDLKREMVAAFMEEKQPYSPHGISSAVDALKLQLPMMQPPKHHLIGFNNGVFDLKRCQFRPHRKHDWLLLASDVEFNSPVPGETLQDYAPQFWRWLNKATANCENKFDRVLAALFMVLANRYDWQLFLEVTGAGGSGKSIFAEICSMLAGKGHTVSASMAALENPRERALIVGYSLIILPDQTRYVGDGSGIKAITGGDEVAIDPKHKQPYSTRIPAVVLAVNNNAMSFSDRSGGVSRRRVIFNFSEVVPENERDPLLRDKIAAELPVIIRHLLHRFAEPQAARRLLAEQQKSEEALDIKRGTDPLVDFCGHLLASDEADGLLIGNAEIVPFNPRKYLYHAYLAYMKGNNLNKPISVTRFGMDMPGALAEYGQHYLRKKSKYGIRSNMNLNIDTASEWMPKLTRNDQPEE

SEQ ID NO: 4448 - protein, 230 aa, Xenorhabdus sp.
MLVFEEINMAITDSWLRSTNGKPQEKMVTKSDRDGLSVRVTPKGKIIFQLRYRWNGKGDRIDIGTYPATSLKDARDSVIFYRGELEQNRNPKIVKRVRKEAVLNAVTVETIIREWWTATMQGSKVRADDILRSFEIHVFPKIGMLPHDEVTLHVWLSLIESIAKQVPSIGDRILTYTKTAHRWAVRRGMTNFTPLSEVELNDLSGKKLVLVLGRVDVLFSSLTRPTWVTR

SEQ ID NO: 4449 - protein, 271 aa, Xenorhabdus sp.
MFCGSRLASDTELLVRERFNVLNQIIWAKPSGPWRRQHKESLRMYFPATERIIFAEHYQGPYHPKGDGYFKQCRELKQSVFKPLVDYFRDARKALGITAKAIHKATGKQMASHWFSDSQWQLPSETDYQKLQGLFDRIAKEKHQRGELNIPYSELVASHLTLSRQYDELRKEYGLMRRSFTVTADVPYTDVWHFSPVQYYPGKHPCEKPADLMAHIIQSSSREGELVADFFMGSGATLKAALKLNRRVLGVELEEERFKQTEQEIKLFTNK

SEQ ID NO: 4450 - protein, 79 aa, Xenorhabdus sp.
MAFIRGRYNGVGWLKVSIDAFICAMFAWFIRDVLNLFGLNPDLAYIGSVVIGYLGTDFIGQLLRKVAEKRAGASSDGNQ

SEQ ID NO: 4451 - protein, 144 aa, Xenorhabdus sp.
MEISDKGLKCIKQYEGLKLKAYPDPATGGMPWTIGYGHTKGVRKGDVITEQQAEAFLRDDLQPIYITLKQWVKVPLNQGQFDALCSFIFNCGSGNFSGSTLLKKLNQGDYSGAAAEFSRWNRAAGKVMRGLDNRRASEHQMFLS

SEQ ID NO: 4452 - protein, 98 aa, Xenorhabdus sp.
MLHELDSKHTQELANAKTEIDTLRADVAAGRRKLRIQATCPVSETTSSGSVGTPTSVELTGEVGSTVLDIREGIINDRAKLSYLQDYVNIECGRKNND

SEQ ID NO: 4453 - protein, 770 aa, Xenorhabdus sp.
MSNKYFALLTDSGANKLENAATSGNKLEITHMAVGDGHLPTPDANQSQLINEKHRAEIDRLFIDPNNPNQIIVEQIIPETEGNWWIREIGLFDEDNTLIAVGNCAALYKSQMQEQTVRMVLPIGDRNLTGWIAELISGLATRSYVRGKIRDHAESRNHPDATLKNKGFVILSNAVDSNSEAHAATSKAVKSTHELAQKAYNLADPVNAMKKWVPLTRKINHKELVNDINLNAADVDAYNKTETDALIAPIQQDIAQAMKLADTANQNATSAINNAENKVPLTRKINDKELVNDIRLIAADVDAYNKTETDALIAPIQQDIAQAMKLADTANQNATSAINNAENKVPLTRKINDKELVNDINLNAADVDAYNKTESDALIAPIQQDVAQAMRQADTAIKEAESKVPLTRKINHKELVSDINLNAADVDAYNRTETDALIAPIQQDIAQAMKLADTANQNGATAIRDAASKVPLTRRINGKELVNDIKLIASDVNAYDKEEIDQLIDGVKELANAANNNADSKVPVFRTINNKALLTDIMLNASDVDTYAKGEIDQQINSVRKLANDANNNVNGKVPLTRTVNNKALLTDITLTAFDVGTYNKNEIDSRLDKVTKNANGRLAKDENGADIPDKNAFVKNIGLGDLIGSKIESQLIGQDATIINLGKITQISGVAIAGTPIKQENTSIVGGVTYYTNYYKIRLPVSLPNGIISCHASIACNNFDSQLPSHLADVRTQRSNSDGVGLSQDTLTISVTTPELGWTPEFYYEVTGY

SEQ ID NO: 4454 - protein, 440 aa, Xenorhabdus sp.
SFRGVPFAVVSGESVFGRRQAVHEYPYRDTAWLEDLGRATRRIALRGFIIQNSAVYHAPDVITQRKNLVAACETGSTGTLVHPTLGELTVSVTESGLRMNESKEFGRVFEFTLTVIESGLKVFAVTNSTKSATEVKKHWLQTYTTTLAKYIAMVRGEIRSVTQGIRIIKQTANQWIGMVTRSMDEVTNLSDMLKTTFGSERYGRYQRGKIGGTVSGATGLRSRDDRQHNEADIIRKTTAAVVMSRKTITDRLDTLNAAHTVETFSEAAGQVVIAIIDSSGSVDEKVAIFEALAAFQNTRYQQGAVDRHITAMTVLLLVVLSAGAMAQVASDFTPSSNQEAHDLQTRVCQALDTALVMAGDLGVDEVYQSLMALRHEFMTSAELKGAESGRLAQFSLPTVLPALTVANRIYQDAGRSDELIQATDPRHPAFMPTRFKALRQ

SEQ ID NO: 4455 - protein, 356 aa, Xenorhabdus sp.
LSLVIGGKAIYGWDSVRVTRGIERLPSDFELMLMDYYPGSDEKQQVEAGQPCQVLLGNDPVITGYIDIWNSSINKSTHQIRVTGRSKCQDLVDCSAKWPQNVISRATALQIAQKLAQWYGIDVTSDVADMEPLPQFTLNWGESSQEIIDRITRWSALLYYDTPDGNLFLTRVSDKVAASGVAQGKNIEQADYQSSMNERFSEYIGLSMNVSGLSELSSGQGYQAVEIASAQDPEAEKMRYRNYVTIIESTLYSHQRQQEAIDWEMNRRYGRSKVLKVLVDSWRDVSGTLWTPNTLIPIHLPVFGLESEQWLLSEVSYVRNKDDGTRAELTLMPPAAFTVQPYEFYSTLMELRNGGY

SEQ ID NO: 4456 - protein, 379 aa, Xenorhabdus sp.
MPFKRKTLTELRAQNRSYLQSELQETGPLLRFSNMGVLADMDAGMAHLHYGYLDYMARQTTPFTATDEWLAGWAALKKIFRKPATAAQCDHYQFTGVAGTVIPAHTRLNRGDGYQYQTVTETRINEYGRSAVRLMAILPESTEDDSGGGAAGNAPAGTILTLDQSLAGVDVEGTAIVPITGGANIESEADFRSRMLLAYQGTPQGGSDDDYKQWALSVPGVTRVWVRPRAAGAGTVGVYIMCDNNGHDGFPVGKDGVSSQESYAVHATGDQLRVADHLYVLQPVTALVWVLSPIKHLLDFTISGLSHVGTAVTGRINDAIDNVLFESGNPDGTGRILLSELQYAIADVPGTAGFVITSPTDNITLPVGHLPLRGKVTYT

SEQ ID NO: 4457 - protein, 146 aa, Xenorhabdus sp.
SVAAYTAALNGLLPTGMAWTRTPDSVMSAVVRAIARSYHRSDQDTHLLLEGSFPTTATIMLPEWEKSLGLPDDCAIGEIDSISLRQKAVVSKLLRTGGQSKSYFIGLAAELGFRITITEFRQARAGISACGAALNGGDWPFVWRIL

SEQ ID NO: 4458 - protein, 43 aa, Xenorhabdus sp.
TLSERLYREQGVDTKTLLGHKSQSMTDKYHDDRGKDWIILAVK

SEQ ID NO: 4459 - protein, 399 aa, Xenorhabdus sp.
LSDKKLKVLLGRKNDKIEFFADGAGLSAKTSKVGGISWVFTYRLDGKKLNRLTIGRYPDMSLKQARETRDKCRNWLASGKDPKLQFGLDMQESLKPVTVKDAIEYWIENYGKDNRVGIDKHIAQLNKYIYPNIGNMALSDCETRYWLQCFDNIKKKSPVSSGIIFQLCKQALRFCRVRKFAISNALDDLTIPDVGKVQNKIDRFLSDGELGQLWKSINTNTYIPYYSNLLIVLIVFGCRTQEVRLSKCSEWDFNSMLWTVPKEHSKSGGKIIRPIPACMKQFLEELIYQNHKSSYFLGELKYGATVAKYGANIWKKLGHTEKWTLHDLRRTLATKLNDMGVAPHVVEQLLGHALPGIMAIYNKSQYLTEKLDALNQWCEQLDVLAGNYENVVILKTGQK

SEQ ID NO: 4460 - protein, 296 aa, Xenorhabdus sp.
SPAQVIHRDVLRWRRHLLVEKKQSSHTWNNKVAHLRAIFNFDIERKLLPHTENPFNNAVAKKEKKKKKILSQSQITRINLLMGKFAEEESIEMTPRGGRCALYPTWYWSTVLATLRFTGMRQNQLLHLRLRDINLDSNYIELGLEGSKNHSEWEIPIIPPLKRRLTKLVERAIAAGAKAHDPIFDLSRLSVPHPSRLSRYQYDINREKQQLRSFFRRLSKECDFAVSPHRFRHTLATTLMKSPDRNLPLVKRLLGHRNVATTMEYIDLDMEVTGKALERELGLYTDFVDEHADENE

SEQ ID NO: 4461 - protein, 152 aa, Xenorhabdus sp.
MEISENGINAIKSYEGLRLKAYPDPATGAEPWTIGYGHTKGVVPGQVITSQQAEAFLREDLTPIYAVLQRFVKVALTQGQFDALCSFIFNVGIGNFLRSTLLKKLNEGNYQGAAQEFLKWDQANGHELSALLARRKSEQKMFLSCAGSFTST

SEQ ID NO: 4462 - protein, 245 aa, Xenorhabdus sp.
MTINTTLQQLEPGSKVLLFALDGSSFGGPELYFHNHPIAYTEAELESSDSLPAKSIWWQGVEYKPWPVEVKGLEIQSDGSTASPALRVANLDGTISALCLAYHNMAQARITLHMTFTHYLDARNFPEGNPEADPTQEKIDVFYIDSKTHEDNTEVHFALSSPADLQGIQIPTRQIHSLCTWCMRGLYRKSPCNYTGTRYFDEESNPTDDPSKDVCGGLMNDCKLRFGENAQLPFGGFPGSALLRR

SEQ ID NO: 4463 - protein, 407 aa, Xenorhabdus sp.
MLLDALFRSEPLENPQIPLTVESAEQDGLFRADVYVSPETSMKLAAVYACIYVLASSVAQMPVHVMRKTGKSVEMAREHPVFYLLHDEPNDWQTSYKWRELKQRHILGWGNGYTWVKRNRKGEVTTMEACMPWQTTLLNTGGRYTYGVYNEEGNFAISPDDMIHIRALGNNQKMGLSPILQHAETIGMGMSGQKYTSAFFGGNARPAGIVSVKGEISEPGWERLKLMWRKAAAALRSEENKTMLLPADLDYKALTVSPVDAQLIDMMKLNRSMIAGLFNVPAHMINDLEKATYSNIGNQAIEFVRHTVMPWVVNWEQELNRRLFTRQERRAGFYVRFNLAGLLRGTPQERAQFYHFAITDGWMSRNEARAFEDMNPVDGLDDMLVSVNAANPIVNSQPPEQEDQTDV

SEQ ID NO: 4464 - protein, 574 aa, Xenorhabdus sp.
VADGIRYAERVVSGEIVAGELVKLACQRFLTDLKTGEARGITFSEPRAQHILNFYKFVPHVKGALTGKPIELMDWHIFILINLFGFVCPLVNEATGEVVLRNDGSGRPVMVRRFRTAYNEVARKNAKSTLSSGIGLYMTGADSEGGAEVYSAATTRDQARIVFEDAKSMIKQARPTLGRLFEFNKLAIYQEQSSSKFEPLSSDANNLDGLNIHCGIVDELHAHRTRDVWDVLETATGARLQSLLFGITTAGFNKEGICYELRDYAIKVLRGQAPDDTFFALIYTLDKDDDPFDETVWQKANPGLGICKRWDDLRRLAKKAKEQVSARHNFFTKHMNLWVTAESAWMDMLKWDDCEPLPPTHELKTYPMWVGVDLANKIDICAAVKVWQGSNGHVHADFRFWLPEGRIERCSRQMAELYRKWGELGILTLTDGEVVDHAQIKDELLHWISGENLKELGFDPWSAVQFSLALAEEGIPLVEVAQTVRNLSEAMKTLEALVYSGKFHHNAHPVMNWMMSNVTVKPDKNDNIFPNKSTPEAKIDGPVALFTGLSRLLVNGGDVPDFLSNLDPDDFLML

SEQ ID NO: 4465 - protein, 288 aa, Xenorhabdus sp.
MQNQKPDVLVSEDSNLAVVTTPEYVKKAIAEHAQSRNHPDATLQDKGFTILSNDTGSDNETMAATPKAVKTAYDLANTANNNADNANNVANSANDNANTRLAKNQNGADIPDKKEFVKNLGIETLMEELSLPAGVPVPWPTATPPEGWLICNGDSFDPVRYPKLALAYPSGVLPDLRGEFIRGWDNSRGVDAGRHLLSHQSADIAPHNHRIHRMWSRSTASAENLGTGNAIFNSVQKNINYGADPRGLGIAIGMGSGGYGYMDNAVANSTGKETRPRNIAFNYIVRAA

SEQ ID NO: 4466 - protein, 123 aa, Xenorhabdus sp.
HQKANQETLSAIQKMKDAQSKAAQLDEYYSGKLAHVTEENTALRADIAAGHRRVQIAAANLATCQLTQKRDTGPRSMGDGTQVELTAKAGRDIYDIRAGIISDQSKLDYLQQYVREVVRQCKS

SEQ ID NO: 4467 - protein, 215 aa, Xenorhabdus sp.
FLMILLTGCTNQESQQVKNDHKSTSKRIFGGDGIMVSQNKLNNQRRATPFDNFIAQAAKRYGVDEILIRAIIQVESGFRPEVISKSNAVGLMQIKASTAGKDAYRLKGKSGQPTMRELKDPETNIDLGTAYISILKKQHLSGIINPETLYYATIVAYVNGAGALLRTFDSDRKLAINKINRMTPNEFYQYVQNNHPAPQAPRYLWKVKNAYLNLE

SEQ ID NO: 4468 - protein, 404 aa, Xenorhabdus sp.
MKLHELKQRRNTIAAQMRTLHDTIGETAWTDEQRTEWNKAKTELDGIDAHIQREESLRSLDQQLVDNTEPEQRQQPEAEQQARRAAAFDKFLRHGLGEMTTEERQALRELRAQGTTPDEKGGYTVPTQMLNKVVESMKAYGGIASVAQILSTSTGQTIEWSTADGTAEEGELLGENTAAKEEDTEFGTASLGAKKLSSKIIRVSNELLQDSGIDMEAYLAKRIAERIGRGEAKYLVRGTGTGSPQQPKGLAASVTGMVEAAAKFSWKDMNALKHAIDPAYRNAGTFRWAFNDSTLKIITEMEDGQNRPLWLPEIAGVVPSTILGVPYVIDQAIADMGPGSKFIYCGDFNRFIVRRVAYMTLKRLVERYADYDQTAFLAFHRFDCILEDTAAIKALVSKGNAPAA

SEQ ID NO: 4469 - protein, 1090 aa, Xenorhabdus sp.
GYRIDYVIEVATDGGSYWDLPTLAVDGKTTTKYERSHRIDLPKAHSGWQVRVRRLTPKQNSNRIADAMMVEAITEVIDAKLSYPETALLFVQFDAKQFRNIPQISCEPKMRVIRVPDNYDPTARSYSGVWSGQFKWAWTDNPAWVLYDLMINDRFSIGSRVRTENLSLAKWDLYRIAQYCDQSVPDGKGGTEPRHTCNVYIQSQEEAWTVLRDIAGIFRGMTYWANNNMNVLADMPRDVDYLYTRANVRDGKFVYSSASEKTHYSTAMVSWSDPQNGYQDAVEPVFDHRLIRRFQVRQADVTAIGCTRQSEAIRRGKWILHTNEYDRMVSFTVGLDGKIPLPGYVIGVADEMLAGRVLGGRLHKADGRNITLDRVSSAKVGERLILNLPSGKAEGRTIQAVNGKVLTVTTAYSETPIAESVWAIDATDLAIQLFRVTGIKEGDDGVSFEITAIEHNPDKYAHIDTGIRIDERPISLIPPGVQSPPKNVVISSDSVVHQGIAITTLRVTWDTAESAIAYEAEWRRDNGNWIAAPRTSTQGFEVPNIYAGRYQARVRAINAAEISSLWANAPETHLKGKAGEPPAPLGFKATPIVFGIQLDWGFAPHTDDTLKTEIQYSPTSDGEGLMLLADIPYPQKTYVMQGLAAGVAFYFRARLVDKSGNQSPWTDFLRGESSTDASWITDAAGNQFLTAEAGKRLQAQLDYQAEADLINGVAIQQNSFELMARDGENKAEIRRLDRVFADREVAWAQSIKEVKSSVGENRSSIQENQKSINKLDLSFAESEQRVQAQLKDQQAIISTKMQAEFNQPGNGYAIHSVNITLKHNGVKYNAGGMVISGEIKNGQLESYIGFSANNFAFYNPANGKLEPFMAAKNGQLFVRHGFIEDGSIDNAKIGNYIQSRDYTAGQTGWKIDKGGSAEFNNVTVRGTIHATNGTFSGTINGADGNFSGTVYASKIIGDVVSVTLGNVSMGRNTHVFFHKRLNDPMPFDRVFFYGPIMTQIYTSNLGLGGGHAEVSVYMNNKHMAGQVFVTEEPDKGPQCLSGTMFTPPIVIPANTTPTIKVVLVTSGPGTVSSTRGIGMLFRASSQWTNV

SEQ ID NO: 4470 - protein, 196 aa, Xenorhabdus sp.
MSEAKLNHNNIAITPGKITVFNYDAITKEYLNSNIEFLAVGVGVPAHSCVDEPLNVKSGFVICRKKDLTGWEYLPDHRGKTVYHIKTRQKLNVTEIGELPNYFTFKNPNTNFDNWDGKEWVTDESSLKKDQVSKAGKKLSTLRKEAHDVILILQYAIDTELATNEEKLSLTKWKKHLVLLSRIDLSVAPDIEWPEQ

SEQ ID NO: 4471 - protein, 176 aa, Xenorhabdus sp.
MLHLKNFKKYSPNTLEEKEIEKKFRAIFYCNENGDDWYKSISKFQEETYKVKYNSNYVVCAINKDASAICPDNGSIVEMESLPNGIDIIGNWQYINGEIVPREYTKDELITQAQEKKRRLLSKTNEVILPLQDAVELNIATEKEIKALEEWKRYRVIINRINCDDINNIEWPDTPE

SEQ ID NO: 4472 - protein, 152 aa, Xenorhabdus sp.
IGIPMPWPTDILPIGWLKCNGAEFTKSQYPELAKIYPSGVLPDLRGEFIRGWDDKRGIDISRGLLSWQDATELPNIYIYAASSTRGRLITPPVNTYPDTYPSDNTAKNIESPKYGSGEYFSPVADLIPTGAVSLANFRVRPRNIAFNYILRA

SEQ ID NO: 4473 - protein, 59 aa, Xenorhabdus sp.
FFVAEVGQVRFPERLTVDELVADIATVFHWRPADTDEMSLSELLDWRHRAILRSGAENE

SEQ ID NO: 4474 - protein, 315 aa, Xenorhabdus sp.
GKEGAPAFRLEIDNKDITGKIQSRLMSLSLTDNRGGESDQLDIELDDANGELKLPSRGNILTLELGWHGCPLTPKGKFVIDEIEHVGAPDRVTIRARSVDLRGYLNVKREVSYHKHTLETIVSTVATRNQLNFKISDTLKNITMHIDQTNESDVSFLTRVAKQEGAIASVKNGELLFIRQGENETGSGTPIPPVKIIRNSGDNHRFTLSDRESYTGVIAQWLDTRTTAKQTVEYKRRESKSAKVEVSVQYESTKTDTPKDQPSNKEPPKKEGGSKTQAKKFPAKEKGKPKHKPRRVDLSKSGAKKHTPSYVQPAL

SEQ ID NO: 4475 - protein, 158 aa, Xenorhabdus sp.
MLKTTPYQSFQHKQSWRHAFNSRVGARPAWQFVGPDNDTVTLSGDLYPELTGGSLSLTALKLMADSGKAWSLIDGSGAIYGMFVIESIDQTKTEFMSGGAPRKISFTLTLRRVDNNLLEMLGDLQQQLTDIKGKMPNSWDELSKLNDDGIKTVKEFFS

SEQ ID NO: 4476 - protein, 1168 aa, Xenorhabdus sp.
VVQKMSNVQSQLDKVLSTVNKLTSSFKSVQQQQKKLVGSVDKIYNQFKKLNKTVEGLKPVVGYAQETARMRADLKAYNQTIKQSFSARQSSSKVTQVSAASQSVNITQITQSVRQENSSGKKNELNVGVTGNMTNNFKLLDKLVININPQITILFGMLNKINGVLNLTAGFVNITFQTIINKIQIFGNVGIRVFNSLRISLNIFTLLGIQAFIDLKNSLNFFVQLSIRAFVALRTSLSIFVQLGLQAFSDLRASLNFFVQLGVRAFIALKTSLSIFVQLGLQAFADLRASLNFFVQLGVRAFVALRTSLSIFIQLGLQAFAELRASLNFFVQLGIRAFVELRAGLNFFMQLGINAFVELKASLNIFAQFGIQIFVDLRVSLNKFAELGRQALDTLKSSLNTFAQLGIKALDTLKSSLNRFAELGSQALDTLKSSLNAFVQLGMQALNKLTHSLDVFVQLGLSAFEELKASLNFFAQLGIQALDRLKSTLEAFVQLGLNAFNELKARLNFFAQLGIQALDRLKSTLEAFFQLGLSAFEELKASLNFFAQLGVQALDKLKSTLDAFVQLGIQALNKLTAPLDIFAQLGTQALDKLKSTLDAFVQLGVQALNKLTAPLDIFAQLGTQALDKLKSTLDAFVQLGVQALNKLTSPLDVFAKLGIQALEELKASLNFFAQLGVQALDKLKSSLDIFTQIGVQGLEELRANLNRFAQVGIQAMENLRDGLKAFAQFGTEALEALRAAMDFFGKTGDKVFGSLNDGADLLSNKGNKDSFGKQRRGLGALGNIGQKVFGVLGNGINILASVGVKGLSFLSNAFSTLGKVMMFLGRAMMANPILAIIGVIAMAAIYIWQNWESLGPKFMALWDSVKNIFSGAWEGIKNLVSIAWEGIKSFFMDGGLIGIIYNNWDTIKQSASEAWEWVKSTISGAWESVKQNTSEIWESVKKSISDKWDEIVADVQAIPEKLKTAGSDMIDNLLTGIQEKWEALKGKISSITDVFTSWWKGDEKKEVALKKTEEITKNETAQQAKKVQTPLLDKGGYVPAGKTAIVGERGPELVSGGASVTSRLDTAKYAAVGVAISAMSLPVAAQDAPLHAQSLPAHAYEEVQAKQMRSQPQQQASAAPQYNIYVYGSQGQSAQDIARMVRQELEQRERMQQARMRSSLSDRGEDFL

SEQ ID NO: 4477 - protein, 676 aa, Xenorhabdus sp.
MSTKYFALLTQLGADKLANAAALGTKIEITHMAVGDGGGSQPVPDTKQTKLINEKRRAAINTLSIDPKNTNQIIAEQVIPEAEGGWWIREIGLYDKDGVLVAVGNCAETYKPQLQEGSGRTQTIRMILIVSSANAVTLKVDPSIVLATREYVDNSITKHANSRNHPDATLKEKGFVILSSAVDSNSETHAATPKAVKAAYDLANAANNNANTRLEKSKNGADVTDKDAFNRNIGSARAFTGAINIGGGGVWTTAEFIEWLKSQGAFNHPYWVCKGSWSYASNRRITETGCGSIHLAGAVVEVMGIESVMTIRVTTAPTSVDGCIPNAQFTYGNHGKDYQPSWRRDYNTANKPTSDEVGAYSKEETDARVNAANENANSRLEKNKNGADIPNKDEFVKNLGLTETKELAKNAVSKSEADSKYQQKGSFGFGGSGGTVIYKNNDEFFNWIRRSGASPEFFRNSADSDYTHTYGAGLLLKAGDTYASFSVNYATARVKVVAGNDAGTANSPIKELAFTDDSYTKSESDAKYQILGLTQIVSEYNIPWNANSGLYYSDFSTHSKLIVNFNIGVGSCPTLQLLANYRNGGLFYRSARDSYGFEENWAELLTVESANSRYIQDVRLGTEEHATLWRGYGYSDTPPYVITEVSNYNRDEFPDSVSRRPFQKLINGIWHNIGAL

SEQ ID NO: 4478 - protein, 195 aa, Xenorhabdus sp.
MGSTQLELAAAKACAKLQKIKIPLRELWNPDTCPASLLPYLAWAWSVDRWDENWPENIKREVIKGSLFLHKHKGTIGAIRRVIEPLGYLIRVKEWWQTNDEPGTFRLDIGVLDSGITHEMFEELEKLIFDAKPVSRHLIGLDINLDTRGGYHYSAATYSGDELTVYPYFPKEVTVSGSEIVGAGVHIIDDMRIRL

SEQ ID NO: 4479 - protein, 212 aa, Xenorhabdus sp.
RTMCSKKTIALVLRSADNSTVPPTPAVMESDNDYRVRIPQAFEGLSVAGPVGAYEFHARSADGRVADASAISPSPANVTVTIMSRQDKGVASKELLEIVETALNDENVRPVADRLKVQSAKIVEYEIDAVLYIFPTPESEPIRKAAEQKLKHYVEAQHRLGRDIRLSAIYAALHVEGVQRVELKAPLKDVVLDKTQASYCTKTTLTMGGSDE

SEQ ID NO: 4480 - protein, 339 aa, Xenorhabdus sp.
GVPRSGKSYEVVKSVIVPAIASGRRVVSNIYGLNEEKIKDYCLKQNKKLSADELGELAYVENGQCLDDDFLPSMENQSTFCRAGDLVVIDEVWRVWGSDKDIPKNHRSFIAEHGHFVDKDTGVMSDLVVINQTVSDIPRFIKGRIETTYRMQKHVALGLSHRYRVDVFQGAKVTKSNRMNFYQEKYDKAIFELYKSVEGNNPNQQRTDARQSIFSSKKIRILILTVPVFVLVSAYSVYNYFNQYLNPESQKQDVSVNSSSLVTALPVNSVLSPVKPAVVLSDKWRITGELVKDGRAYVILADKQGRLRFEPRSQFQYSGRLLQGEIEGQIVNYYSGGIQ

SEQ ID NO: 4481 - protein, 197 aa, Xenorhabdus sp.
PEQVTHRDVLRWRRHLLTEKKQSSYTWNNKVAHLRAIFNFVMERKLLPFTENPFNDAAVKKEKKTKKILSKSQITRLYLLMGQYEEEERRQVIPRGGRCALYPTGYWLTVLDTFRLTGMRQNQLLHLRLRDINLDSNYIVLRVEGSKNHSEWRIPMIRQLKPRLAKLVEQAKACGAKDDDPLFDLSRLRVPPKNPQK

SEQ ID NO: 4482 - protein, 237 aa, Xenorhabdus sp.
MSFMKKKLTAEQLADAKRLKDIYVSKKKQLGISQEKFADELGKSQGAISHYLNGTNALNLEIAAYFANKLEVTITDFSPTLDKQAKKLLTAVYGKNIALVEKPDTCKQYPLLDWADAGNWCEEPILPYSIKQRYDSTVECSRHAFWLEVKNDSMTSPNGISIPQGMIILVDPKVKPLANKLVIAKLEGEEKLTFKQLITEGYDTYLKPLNPQYSMIPLSENIHILGVVVEARVAKLP

SEQ ID NO: 4483 - protein, 370 aa, Xenorhabdus sp.
MNMQDKKSDVPVSDESNLVIVATPEYVKGSIAEHAASRNHPDATLQDKGFVVLSNDVGSDSETMSATPKAVKAAYDLASIANQNANIRLSKEQNGADIPDKAEFVNNIGLRNTVNQALNAVPNSRSINGKSLATDIHLMAKDVTAVSANALGVVNSSAPFQHFLSTGFAVVNIPQADKVPDFPIGLYSFGILEVQGDYSVVTQRYTSHIGEIAIRQSWDEGRSWHGWYTIRGTANTYATSSSVTKKKLPTILIYSDGTSTTSDKFEGVTTERISKGVYLIKGTSGFNTDGIQSDTDSDIEIPLSKNKLPLIWIDHNILPDGSIKLMTYHREHSDAPAFARNIREGYSDGDLIDIPDGRFVSVQVQMPDTK

SEQ ID NO: 4484 - protein, 161 aa, Xenorhabdus sp.
VDMQRKVAWINPENAKAGKAIGVALNDTACRVLRDQIGKHSRWVFVHTKAKHRPDGTLTPAVRKMRVDDNSAWNIGLKKAGIEDFRFHDLRHTWASWLIQSGVPLSALQEMGGWESIEMVRRYAHLAPNHLSEHACKIDVLFEDNDTNTTQGKNQAGLRLA

SEQ ID NO: 4485 - protein, 215 aa, Xenorhabdus sp.
GSLDLAGFNISCYVLKDGTRILSGREMQKALKLVDEETSYQVSGDRLQRYLNQKSLAPFIYKDKSETHYEPIICYEGEKKINGYEASILVDLCDSFMQARKEITLSARQSIIAEQCEMLIRSFAKVGIISLIDEATGYQYDRERDELQKILQAYVSDEILKWQLTFTDEFYKEIFRLWNYPYTSNNIKKKPQFIGKLTTQQPPTKVGGLVINGLK

SEQ ID NO: 4486 - protein, 1111 aa, Xenorhabdus sp.
MANLSTLTVGLLVNATAFKSRIMEAYRYAGRESERFTDQAGSDAKKLEKTYRSLASHIKSVSGQLALLAGTGFSLNTMIFHTRQYGQALSDLSAITGATGEQLKKLDENAQRLGRTTEFGATGIAQALKLMASAKPELLKNTEQLTQATEKPVILAQASGIDLPDATRALALSLNQFGASAAQADRFINVLAAGAKYGASEINETAQAIKQGGTLAAQAGISVEELGAAIQILAERGIKGGEAGIALRNVILALERSTDKNLKPSVVGLSSALESLMGKNLSTAQAVKLFGRANVSAASNLVTGREKLDALTQALTGTQVAYEQASARANNLSADLEVLTSAFEGMALKIGQSADGPLRTGVQGATHAINALSENVNLVASVALHTLIPVIATKLTAGLRENMTAWRATEKAARDMAKQQAETAKRTLEQANATLRSTEAQGRHIQYLERTNRLHGLSVNYAKEKSTLIRQETEALKLQTQATGQLEAANRRLSYAYRALSAVSGAARGALALMGGPFGAAMLAGSALYGLYNASVQAREGLRHLKEESVETVAELQRLSKIKVAVELDKTDDDLNNLKAELRQIDSQLERYSQTRIEHLENRQKGVLSFFYEDPKAVEKQGRVLLSRREDILKGIEKKTARKKNLQTTSVAGIFDQPPSEPPKPEENGPGNPWTGQDLIKAEKQGKQSLHRYQQLRKDIEQTHATSLDRIRISEKAMRDKIHEVGKSGIASDSELQRLNLLNAENHQKQRLELAEKYSPVAALIRQERDASAELKALYNERLLTEQEYLSASKTLYQTSVKDKLAEQAKQIAAPHLDMTGEVDPVVQLQNQLTEQQALYDSYYRNGLISKERHEQLMTAAAYRSNGAQLAAAKDLYASQGDFQKMQMDLLDVVEQRTGSALTGMLTGTKSFSASMRALSASLAQSIIQDLIRIAMQALITKALSGFFGGGMGSMGASALSSAGGSLSSVGSGTTITPDVWKSPIMNAKGGVYQSTDLNQYSGQVVSQPTLFAFAKGGGVMGEAGPEAILPLKRGADGKLGVQATGSTGNSTFNSVHIVIHAEGTHDTKTSRGAESAGQDIAKFVDQRFKFLLHKSLSQGGELSAAIKGGR

SEQ ID NO: 4487 - protein, 109 aa, Xenorhabdus sp.
IKTFDFPVRVGASGEFEPVVRTVQFGDGYQQTSGNGINAQRENWPVSFVGTLSDIEPIIAFLREHQGWRAFKWRNPLSEPGLYQAGKFTVQANGAYFTLSVTFTRIYHP

SEQ ID NO: 4488 - protein, 245 aa, Xenorhabdus sp.
MTLNATLQRLEPGSKIVLLTVDGSVFGGPVLYFHHHPIPYTEAELENSGNLPVKSLWWQGVEYKPWPVSIEGLEVTSDGRAVTPTLNVANLDGTLSALCLAYQNMVQARVTIRMTFAHYLDARNFPDGNPQADPKQEKIDVFYIDSKTQEDNESIQFSLSSPADLQGIKIPTRQIHSLCTWCIRGQYRQSPCGYTGTRYFTERGKPTNDPASDACGGLMSDCKKRFGDTEQLPFGGFPGSALLRR

SEQ ID NO: 4489 - protein, 248 aa, Xenorhabdus sp.
MTILRKATTRAMMAHAQAAYPNECCGVIIQQHRRQHYLPCRNTAPSPTEQFCIHPEDYAAAEDQGEIIAIVHSHPDATTQPSPLDIAQCDLSQTPWVIVSWPEGDIRTLMPLAGIKPLIGRPFVHGFWDCYAIVRDWYKLERTLELPDFDRTDGWWTRGENLYMKQYAAAGFVACRGELQAGDVIIMQVQANEPNHAGVYLGDGLMLHHLYGQLSKREPYHGYWQERTTITLRHVSASADFLFRRVTS

SEQ ID NO: 4490 - protein, 191 aa, Xenorhabdus sp.
MNTLRTVRLYGVLGTQFGRVHQLAVSTPQEAIRALSVLIKGFERFLLTAKAQGLTFAVFNGKRNISREELVFSGQDDIRIAPMIIGSKNAGVFQTILGAVMVVAGAFLWATPFGAPMVMSGVGMMLGGVVQMLSPMPGGLARREDPDNKPSYAFGGPVNTVAQGNPVPIGYGRRRIGGAIISAGIYAEDQQ

SEQ ID NO: 4491 - protein, 276 aa, Xenorhabdus sp.
PIQGNKGGRQQPRTPVEAPDSLQSTSYTKILLALGEGEFAGELDGRRIFLDDTPLIGADGSPNFEGVKWEFRPGTPHQAYIPGMPAVENARTVSAELVSSWVTTVTNTQLSAVRLRLSWPQLQQQKENGDTVGYRIDYAIDLATDGGAFKEILKTAVDGKTTTQYERSHRVDLPAAYSGWQVRLRRLTPKQNSNRIADAMVVEAITEVIDAKLSYPETALLFVQFDAKQFRNIPQITCEPKMRIIRVPANYHPDSRRYYGSWDGTFKWAWNDHSGL

SEQ ID NO: 4492 - protein, 312 aa, Xenorhabdus sp.
MGKFGGPIGGALSLAAQAEQGREQLMQEVHQEAEKTGEDPVKVLDRKLKEKRANEQPFITWGDVGGWFSDFFSGGDKQANSKTALKGKPLLESMAGHFAMLEKKHGLPPGLLHGVAMTESSGDPNARGKPTASGIALGMFQFMPGTAKQYGLIGNDVFNPYKSAEAAARMLSNLLKQTNGNLDKALAGYNWGIKYVLEKGINNLPKETRNFLPRVKGHMARAPKPGNKGIDFDLSMFENAMPNIQNMLSHSSYTPEYLRAASSLAQNQTTIAPVYNINVSGTSSPLETAALTGETVQRTNAILVRNLQTKVS

SEQ ID NO: 4493 - protein, 122 aa, Xenorhabdus sp.
MHRDMQKILLHWGGWVVQGRVNIGWKSVSAGFKNAVTYSGSNKLSCSDEDGMIIDSCVAKLRNVGMAQECDFIEHHYVSGMSKRAIGRKFKLGESEVRKRMLVAESFILGCLEALDEPLEID

SEQ ID NO: 4494 - protein, 312 aa, Xenorhabdus sp.
MANPLYRKHIISINDLSRTDLELVLQTAAALKANPQTDVLKHKVIASCFFEASTRTRLFFETAIQRLGASVVGFADSSNTSLGKKGETLADTISIISQYADAIVMRHPQEGAARLASEFSGHIPIINAGDGANQHPTQTLLDLFTIQETQGKLDNLKIAMVGDLKYGRTVHSLTQALAKFEGNHFCFIAPDALSMPNYILHMLDEKQVSYSIHNNFEDVLPELDILYMTRVQKERLDPSEYANIKAQFVLRAADLVSVKENLKVLHPLPRIDEITVDVDKTPYAYYFQQAGNGIYARQALLSLVLNENVVIK

SEQ ID NO: 4495 - protein, 225 aa, Xenorhabdus sp.
MTMGIFSRFADIVNANISSLLDKAEDPQKMIRLMIQEMEDTLVEIRSTSARTLAEKKQLLRRISTGESQIEGWQEKAELALSKDKEDLARAALIEKQKVSQLVETLKNELSILDETLDRIKGEVTELENKLIEARARQQSLTLRHQAAASSREVRRQLDSGKIDEAMARFEQFERRIDHMEAEAESVGLGKKKSLEQQFAELKADDEISAQLAALKAKMSAKDPQ

SEQ ID NO: 4496 - protein, 701 aa, Xenorhabdus sp.
IPAAYSGWQVRLRRLTPKQNSNRIADAMMVEAITEVIDAKLSYPETALLFVQFDAKQFRNIPQITCEPKMRIIRVPANYHPDSRRYYGSWDGTFKWAWSDNPAWVLYDLMINDRFSIGTRVKAENLTLAKWDLYTIAQYCDKTVSDGEGGEEPRFTCNVYIQSQEDAWAVLRDIAGIFRGMTFWANNNMNVLADMPRDRDYLFTGANVRDGKFTYASASEKTHYSTAMVSWSDPKNGYQDAIEPVFEHRLIRRYGIRQADITAIGCTRQSEAIRRGKWVLHTNEHDRTVTFTVGLEGHIPLPGYLIGVSDNLLSGAGRSGRIQAVPRRYMLTLDRVPSAKVGDWLVINLPSGKAERDLITAINGQDVSVSSGGYAYSDLPEAGAVWSIESSYSVEHPFRVIGIKAGEDGVSFEITAVEHNPDKYALIDRNTRIDERPVATLPPRVQPAPKNIRIDSDYSINQGIITTTLQITWDAADSAVAYDVEWRKDNGNWITAPQTTARRLEVPNVDEGRYQARVRAMNAAAISSIWTTTRDTLLERHTRPPSEPHSLQTTPLLFGIRLDWDFANPTDILLKTEIGYNKSGEEDDTLQFADIAYPQRTHTLQGLAAGEKLYFRARLVDKSGYASAWTSLVSGHASNDTGWIVEASRDHFLDAKTGRRLQEQLAEQARVDARYKQSAVENARAIEKLHDMLKDLQQRTR

SEQ ID NO: 4497 - protein, 106 aa, Xenorhabdus sp.
FIWRPQDNYEVSHEPRVKVIKFGDGYEQRIKDGINNQLKRYQLNFAGSAETGRSIDAFLRARGAVESFVWRTSDDNQLRTFVCRAWTVNRHRVRWSVSCVFEEVVA

SEQ ID NO: 4498 - protein, 225 aa, Xenorhabdus sp.
VAVTELGQNAILNLYEIDLTMFGGDVYRFHDGMNGKLQPVIWQGLRYEPYPVEVTGFEMSGKGPSSRPKMVFANINGLLTAINQDFNDALGAVVTRRQVPELYLDAVNFPNGNPQADPTREAVSKYLIEQKQDANADFVTYILALPSETDGALIPARVIQADICCWQYRSADCGYDGPPVADEKDQPTTHPQKDRCSKKFSGCLARFPRPVSMPFGGFLGANKLG

SEQ ID NO: 4499 - protein, 237 aa, Xenorhabdus sp.
MIEKDIIAHSKAEGVREACGLIAGGRYFPCRNISPEPELYFEINPDDWITAECFADIEAIVHSHPNGKPRLSTADRTQQLKTSLPWWLACGDRVHQFRPVPRLLGRAFIHGSQDCYSLIRDAYHLAGIELDDIPRDDAWWNAGQNLYLDNSLSQGFKQVDDIQPGDIILICLGSQTPCHGAIYLGNQHILHHRPDRISKRDVYGGYWLNYTHSVWRHPQWSSYSLEAIFEDLAVATN

SEQ ID NO: 4500 - protein, 50 aa, Xenorhabdus sp.
MVKLQLGGHLRRFGRRYELEVRDAAEAVRCLCYQLTGLPIRLSVPITSKA

SEQ ID NO: 4501 - protein, 787 aa, Xenorhabdus sp.
VPVLSVNRVADTPKRTYHIKGMIVQVPDNYSPETREYKGVWTGRFKPAYTNNPAWIFYDLVTNTRYGIGKLMGSFGCDKFALYAIAQYCDQLVPDGFGGMEPRFTCNAYIANQRKARDVLDDLASVFRGMQVWNGLQLTCFQDRPTDPVWTFTNANVVEGKFNYSAAAKKARHTIIEVTWVNPENGWKEERELIQDDALVDRLGLNVKKVTAFGCTSRGQAHRVGRWIIETEKLETDSVTFSTGREGINCIPGDIVEIADNTFAAARIGGRVLDFSGKTVRLDAPAEFASDESGYFSYMGNEGQFVRVEIESVSGDVVTLKDVPAGLRQWGVFSIAKRSLVTRLFRVMSIAEDTKTGHYNFTCIQHEPQKEAVVEHGVDFQGTPATQNVIRIPNIERLSMAYIQDSTQVQARAMWATTTFNRTITFDVALYRDNKVVSHGNTQELEYYFSGLEAGVYTVGVRARDDNGMLGDEAKVPMVIGAPAAPSVITIEPGFFELKALPYISAPKTLDTQFEFWFSDRSIPDINEIETKADFLGIAKFWTKGRLKAGTAYWFYVRSVNEFGKSHFVEAQGKPDDRAKEILDITGKQFLSSESGKRLTEDIRHNADRVEEIEKVTQALGDKTIELESTTHQLGNKTVNLEDQLVYVAEGTLENTRFTTEVSQRVVEESADRKAEIYRLEQVQANDREAHAKFQSQISTEVAENTAAVLEVKEAQTTQEKAFSQALNQVKASLKETEEGVQDVAGRVTHHSEAIANLSEAQAKFEQTTTSQFASQKSDLSRIETSL

SEQ ID NO: 4502 - protein, 582 aa, Xenorhabdus sp.
MAGRIPRVFINDLLARTDIIDLIDVRVPLKKKGKNHQACCPFHNEKTPSFTVNGDKQFYHCFGCGAHGNAIDFLMNYDRLDFVESIEELATMHGLEVPYEAGSGGGHIERHQRQNLYQLMDKLNSFYQRSLTTPNGQAARQYLTRRGLSEEVIQRFAIGFAPAGWDNVLKQFAHNTEDRNQLSDAGMLVTNDNGRTYDRFRERIMFPIRDRRSRVIAFGGRVLGDALPKYLNSPETEIFHKGRQLYGLYEAQQSHNTLSRLLVVEGYMDVVALAQFGIDYAVASLGTSTTAEHVQLLFRTTDSVICCYDGDRAGRTAAWRTLETALPYLNDGRQLRFMFLPDGEDPDSLVRKEGREVFEQRMEKALTLSEFLFDSLLLQVDLSTPEGATKLNSLAMPLISQIPGEALRLYLLKELGKLLGIPDTTQLERSLAKLVKKDTNTYQALKLKPTTMRILIALLVQNPHLATLVPSLQGMFSAQVAGLPLFMELVDTCLAQPGLTTGQLLEQYRDNKYAKQLEKLAAWNDIQVEEIAEKTFSDALNHLFASALEERFKFLVAKERTEGLTPEERKEVWLISESSAKK

SEQ ID NO: 4503 - protein, 544 aa, Xenorhabdus sp.
NSLMNTAMSGINAAQVAMGVVSNNIANSKSEGYNRQNTVMTQNNGTMSPVGFIGNGTTVTTINREYSEFINQQFNSAQTKHSALKSYNEQITKINNLLADKDTSLSNSFEDFFKSIGTVESNAEDSAARTTVLGKAEGLVSRFKEADEFLRQLDSGINSQIEQNVKEINKYAEEIAKLNNEIIRMRGTGTGEPLALLDKRDLAVNKLNQLVEVNVTQQDGGVYNVSFGGGMSLVSGSKSYRMEAIPSSADSGRITLGYNNGTVGTREIDERFISGGALGGALRVRSEVVDSTRNELNQLALVMADQFNQVQHGGFDLKGEKGIDFFNFKSSEIISSSDNKGTAEIKVEYADSTKVKASDYTLKYEGGDWKVQRVSDREMVAVTKNGNTLEFDGLKVEITATDAQEHDKYTLKTVGNVIATLEVNLKDSSQLATASEKGAGPSDNRNAKKFLELQDKRLVDGKASFSGAYASLVSTVGSKANSAQISVETQGHIVDKLKETRESISGVNMDEEYGELQRMQQYYLANARVIQTATTLFDAILGIR

SEQ ID NO: 4504 - protein, 885 aa, Xenorhabdus sp.
MARIPEAELQHLKTAVSLVAIIEQQGRQLVKRGKDMTVLCPFHEEKTPSMVITPPKNLYHCFGCDAGGSVLDWVMKTEGLSLRHAVERLRAVLGSNPAVEPLVDPSAMSCDAAGQQALLSRVTAFYHQTLLNAPEAHQYLKKRRLDHPELVRQFKLGFANRTLGYRLPDKKRKAGAAIRAQLQAVGLLRESGHEHFSGSLVIPVIGLNGEVQEMYGRKITDRLRAGTPLHLYLPGAHGGVWNEAGLAGSAPVILCESLIDAMSFWCAGFRNVTCSYGVHGFTEAHRAAFRQHEIRQVHIAYDNDKAGNDAAAVLAAELQLAGLDVWRVVFPAGRDANRFSCEVANPETAFGQLLAAAQWLGEPAKMPLAGQNTAAVSVAALVPKPGVVTTLAGNGDIVIRQEAQEWRVRGAQQKAGATVMKVNVQLLDKNSGALFTDSVDILSARARAGFVRQAAQELALPETLIKRELGRVLLVLEQRAWAAETTGQVAKSLDAGEQQSALALLQDPQLISRITADLAACGVVGESTNLLAAYLAAVSRKLPKPLAVLIQSSSAAGKSSLMEAVLNLIPAEERIQYSAMTGQSLFYLGETNLQHKILAIAEEEGVRQAAYALKLLQSDGELTMASTGKDEATGNLVTKSYTVKGPVMLMLTTTAIDVDEELLNRCLVLTVNESREQTEAIHALQRRKQTLEGLLAENERDYLTALHQNAQRLLKPLNVVNPYASQLTFLSDKTRTRRDHMKYLTLIQSIALLHQYQRDIKTTEHRGKRLEYIEVTQDDIRLANQLAHEILGRTLDEMPPQTRKLLLLIQAWIRESGQARHDKIFTRKQLRDAVQWGDTQLKVHLSRLVEMEYLLLHRRGLAFAYELLFDGEDSHAAHLNGLIVP

SEQ ID NO: 4505 - protein, 184 aa, Xenorhabdus sp.
MTASPDPAQTISTAATTEIQHHAQIAIVMGSKSDWATMQHAADILASLDLPFHVEIVSAHRTPDKLFHFAEQAKTNGFEVIIAGAGGAAHLPGMLAAKTLVPVFGVPVQSAALSGVDSLYSIVQMPKGIPVGTLAIGKAGAANAALLAAQVLALHDETLFQRLADWRQTQTQDVLENPDPREDA

SEQ ID NO: 4506 - protein, 434 aa, Xenorhabdus sp.
VALMNSDLFAHTYKQSGMFQPNIPQNASSAERLLWQVNAEDHQWRHQYIGQMPDFLAKHFSHRYADIFAQSGRRDANAYLRKTVGQNVLPRLQLVKSRYQIKHSVSGIAPFPFIEQLSNIATYSRKPLLKLAHEISVFITENYEHYSSMSQSHSVTNDSSNRQEVQQVQTESVMNESARFSHMTEVYQLMAKLTLQCGIHPPYWRQFNYGRKTLSVDLLCAGMLRMMSTRWWYFRLKRLRDTQSEHMAIAVGQVQNAASPYVSLLALREWLEQKRRNREFFQHFDLENEAGERISLAETVVHSNANPAIRRCELMVRMRGFEDIANQMGCVGEFYTITAPAKYHAVRHRGGFVQKWEGATPRDTQHYLCSVWAKSRAAIARAGIKLFGFRVVEPHHDGTPHWHILLFMLPEHASQVRKILEHYSCQEEKEELLG

SEQ ID NO: 4507 - protein, 126 aa, Xenorhabdus sp.
MFPNGEGIKKTERLEDIIAPSISRVKLSGGKLNEADPVILDSELISKDLREPLVVDDGISWYLLDAQEDTIQDGLWLVDIEGMHSIKKIAKIPVSKIRVSDNDVTFDCAISDIQFIGRVALVISRQ

SEQ ID NO: 4508 - protein, 207 aa, Xenorhabdus sp.
MSYSGKQDQYAPNMSLVPMVVEQTARGERAFDIYSRLLKDRIIFLTGQVEDHMANLIVAQMLFLEAENPEKDIHLYINSPGGVITAGMSIYDTMQFIKPDVSTICMGQACSMGAFLLTAGAKGKRFCLPNSRVMIHQPLGGFQGQATDIEIHAQEILKVKARMNELMAKHTGQSLEKIVEDTERDRFLSAGEAVEYGLVDSIFTQRN

SEQ ID NO: 4509 - protein, 144 aa, Xenorhabdus sp.
MKISNKGLSFIKQYEGLKLKAYPDPATGGMPWTIGYGHTKDVKPGQVITEQQADAFLHDDLQPIYLTLESAVKVSLSQGQFDALCSFIFNCGAGNFARSTLLKKLNAGDDQGAADEFLRWNKAAGKVMNGLTKRRASERQMFLS

SEQ ID NO: 4510 - protein, 156 aa, Xenorhabdus sp.
VTEMKLNSQYFTLSALVIVSGLFWFYYSEYQDKAEAYTSLKLQYDGQAIAIKQQQERILHLAELDKAHIQELANAKTEIDTLRADVAAGRRKLRIKATCSVREATSSGSVVNATTVELPRETGQAVLDIREGIINDRAKLRYLQDYIKTECQRTSE

SEQ ID NO: 4511 - protein, 147 aa, Xenorhabdus sp.
MTTLDFSALNDLSRDLALLSKAESDKVLRRSTQASAKILRDETRRRAPVRTGKLRRNIRTANRRKGRDGTISAGVYVQGSNQSGTNSDTRMKKTDPRNAYYWRFLEKGTSKMAPRPFIDPAFEAKAEEAADAAFAVALKAIDEVLMK

SEQ ID NO: 4512 - protein, 70 aa, Xenorhabdus sp.
MYTDVLSGQSLKMTRLQVDAYATTFEQADQICQGALNAVKHLQPVDVERENGFEEDTELYRATLTCKIYT

SEQ ID NO: 4513 - protein, 154 aa, Xenorhabdus sp.
MAKYEKTLGTSLSVSAEAANDDSNPAIKWIAIDTSVKEISYTGGQKSDIEVTTLGSREQEMINGLAAPAEITIAGHWTADEEGQDILRLAYDTDQAYAFRVKFPSGNGYTFLAEVRQESWSAAANGIVSASFTLRMQGRPTPLVKKTPSLQKDK

SEQ ID NO: 4514 - protein, 127 aa, Xenorhabdus sp.
MDLRQLALTPRLGFRTKTVTVQEWHHATVILREPSAAAWVAWNEIMQPETDEEEVPLSVAEKVLRNTRADVALFIDVLCDEQGMPVFTPADTEAVMKIYAPAHARLLHQALSLVTDTDDAEKKSDPR

SEQ ID NO: 4515 - protein, 1125 aa, Xenorhabdus sp.
VAKLRELIIKISANSSSYQSEIAKAARLGENYHRVMEGGNRRAAAAARSSSAALRDLNNQLVSVKASAMGLTGAFAGIFATSKLVETADKWTNLNSRLKLATQSSLDLAESQRMLMAMSQKTGTSFEANATVFARAATPMRALGYATKEIVGMTETLSAGLRVSGASASEASSVLIQFSQAMSSGVLRGEEFNAMAENGGRILQALADGLGVSRTKMKAMADGGLLTMDKVIPALLSQLGKLRAESESMGATVEKSLTRVQNSFMEWVGDVNKATGTTRVLAGTLDDLSKNINNVAAAGMVVAGLFGAKAIGNRLTAIQASTSALIQNSRAEINNADQAYRNAQVQVANARATELQAQRNVLAARSRLLQTTNDQQFTAAQLRLNRAIEAEAKAHAVVTQSIAARAAAQSRLNAVTSLGQRMGGALLGAVGGIPGALILAAGAAYLLYQNQKQAKEEAREHAKEAANIRKELSKMDPIQLRINKEKLTEDLAVAKQDLESFREEMAINRSRLLTFMKNKSQGKNVDDKITEFSTKLSESHSAYEATKKTIDEITATLASLGEQQSINSEKAKKFAAAITEMQKTGNVMQALQNQELKLTVSLLEQIKSLGIDVSGIRIPVPEVKFEPNDKLKALLADQEREIDLSRRKGLDKAQREAHYKAIDAGLNPNDRQQKPYVDRMVNNATQIYQNTEAMRKQDEAAREARNAAERATQKAARAAEDYAQKVAELNTQLATEAVRYQEGNTAAERFAAAQGNVTKFTQAQNTQLNLLNQKLEEAKQRYQDLQAAIEADPFRHVAKRTQEATEQLQRQQANGQIESPAEYTYRKSEIWKDDVRGKAEASQQYAVSAKNDLLGDVDPIQDIENQLERKKALYQTYADAEVISQQRKGELILAAERDTDSKRIEAAKQVFASQGELQSLAVTMFETTQERMGNMITGLLTGSKSLREGMSELFASLAQDVVKSLVKMAAQALITNTIMKGMGSMGGGGMFSGFASMFTQNAKGGVYTSANLSQYSGQIVNSPTLFAFAKGAGLMGEAGPEAIMPLKRGADGSLGVRAVFPAGNMGGAPNIQIYITEGKAESTSSKGENEAFGRRFAQAVAQVYYTERDRDLRQGGAINKAIRGR

SEQ ID NO: 4516 - protein, 95 aa, Xenorhabdus sp.
VEFAIRKAKFGDGYEQVSGAGIHPKSMRWNVDFVGSEKYITDIIAFLDRHAGHQPFIWQPPLANKGLFRCETYKYQAIDYKSYALSTEFIEAHAP

SEQ ID NO: 4517 - protein, 246 aa, Xenorhabdus sp.
ADVQKLHAGNIVRLYEIDGTKFGADVLRFHAYGMPVTDEEIEAAEKKGSPPSPKSLWWQGKEYAPWPVQIEELEMSTDGQAARPRLSVSNIEGRVTALCLQFDDMVQAKVTIHDTFVHYLDARNFTEGNPTADPQQERQLMFYVNRKVSETDRVVVFELASPASLEGLFIPTRQIHGVCTWCARGWYRTGKGCDYTGTRYFDINNHPTDDPSQDRCPGTVIACKLRHGEENELPFGGFPASSLIRR

SEQ ID NO: 4518 - protein, 233 aa, Xenorhabdus sp.
MRDKTLDAVFAHAKADYPNECCGVVAQKGRVEKYFPCQNLACNPTEQFQLAPNDYLNASLWGTVTGIVHSHPDATTYPSELDRAQCDFTELPWHIVSYPEGDFRTIYPRGELPLTGRPFVLGIYDCYGLIMSYYRQQYGIVLKDYRVNYPWWEQGENRYMDNFKSAGFTEVSEPRVGDVVLMQVQADVPNHAGVLLEGNLLLHHLYGQLSQKVPYGGYWKDRTISVVRYIHLK

SEQ ID NO: 4519 - protein, 199 aa, Xenorhabdus sp.
VRLHGVLATKFGATFEYAARDALHAFRAMSKLIVGFEAFMLNAHQQGFTFSVIVGGRSYNKDELDMTKGHADIHIMPVMMGSKRAGLFNVVLGIAMIAVAWWNPLGWAASTALFVGASGAAMAMGGVSQMLAPQPPGLTMRESPENKPSYAFGSPVNTTAQGNPVPILYGSREIGGAIISAGVYTEDQYQTEQIENQRK

SEQ ID NO: 4520 - protein, 245 aa, Xenorhabdus sp.
MNRKLVNAIANRDGAALSRLSEDRQPSNQPVVNENAERLVNALFRQLKQVFPAAMQTNLRNESDEALAKQQWIAAFAENGIRTKEQLSAGMRQARASESPFWPSPGQFVQWCKQGEALSVGLPTEDELYEMFRDYCKYRGWRDVEWQSNACYWMVTNIHAEMLRQNLTDSEVKKLCSRELKIMAKRIQAGEKIPEPVVQIEKKYTPTDSYESLRQIYYLKEMLKKTDLSFHEWLCESNRKHKKGY

SEQ ID NO: 4521 - protein, 337 aa, Xenorhabdus sp.
KANGGNALAKKRTAEERKKSSMKAVAAKKAKAALPLVVNEGPLVIGDVILDVAVLENGDRVVAAGSVFEALGRTRRGSKKTQSDQRVVDGISTPPFMDAINLIPFITQELIDVMSKVQYKTDTGTVKEGYNVLILPLVGDLYLKARESGVIRTSEQHEVAHKAEVLVRSLAKVGIIALVDEATGYQRDRKRDALASLLEKYIAKEMRPWLRTFQLEFFEELCRVWGYNMPEKPGAYPPVFAHVIRDIVYDRLAPGVRTKLQELKKKNGGKMHQWLTDHAGYGDLTRHLGEVTMLLRLTTDGDKDGFLNMLDKIKPVLTVDDLIEASASKDKAKLIDK

SEQ ID NO: 4522 - protein, 144 aa, Xenorhabdus sp.
MKISESGLSFIKQYEGLKLKAYPDPATGGIPWTIGYGHTKDVKPGQVITEQQADAFLHDDLQPIYITLESAVKVSLSQGQFDALCSFIFNCGAGNFVRSTLLKKLNAGDYQGAADEFQRWNKAAGKVMNGLTKRRASERQMFLS

SEQ ID NO: 4523 - protein, 142 aa, Xenorhabdus sp.
SVIIALIIASGAAYFYRSGYKKQLGINNDQATEIQQLTDRINYQNTHIDMLHELDSKHTQELANAKTEIDTLRADVAAGRRKLRIKATCPVSEASSPGSVGDAGAPQLTEPARQDYYRLREMMAENERQTKYLQEYIRDQCK

SEQ ID NO: 4524 - protein, 228 aa, Xenorhabdus sp.
AANEWNWIKSAPVIKTKKPVSKRIRWLTKDEAARLIECMPESIKPIVIFALATGLRRSNIIDLEWQQVDMQRKVAWINPENAKAGKAIGVALNDTACRVLRDQIGKHSRWVFVHTKAKHRPDGTLTPAVRKMRVDDNSAWNIGLKKAGIEDFRFHDLRHTWASWLIQSGVPLSALQEMGGWESIEMVRRYAHLAPNHLSEHACKIDVLFEDNDTNTTQGKNQAGLRLA

SEQ ID NO: 4525 - protein, 56 aa, Xenorhabdus sp.
MKLTESQCNDLNVKEAEQAIAWVRSNIKVSLTEPQIAGIASFCPYNIGPGKCFAAQ

SEQ ID NO: 4526 - protein, 59 aa, Xenorhabdus sp.
RMDKYTSPSAYGWGAFTAMLGALSLNDWAIIIGIICTVGTFAVNWYYKHREFSKHEKDE

SEQ ID NO: 4527 - protein, 264 aa, Xenorhabdus sp.
ELLVRERFNVLNHIIWAKPSGPWRRQNKESLRMYFPATERIIFAEHYQGPYHPKGDGYSRQCRELKQSVFKPLIDYFRDARKALGVTAKEIHAATGKQMASHWFSDSQWQLPNEGDYQKLQVLFDRIAKEKHQRGELNKPYPELVESHLTLSRQYDELRQEYGLMRRSFTVTADVPYTDVWQFAPVQYYPGKHPCEKPADLMTHIIQSSSREGDLVADFFMGSGATLKAALKLNRRVLGVELEEERFKQTEQEINEIFSVSSKL

SEQ ID NO: 4528 - protein, 812 aa, Xenorhabdus sp.
MADTQSNQTRPKFTSSDITGNQKLLDLIQTVKKSAMYHWENLLPACGIDIPVKGKHGACPVCGGTDRFHFIDDHHHGNWHCRQCDYPNYGDGLDLVAKTKGISITEAAKIIAGVLALPLPEPKPARETIQTTQSIAGKVASLMAQTVAGQSPYLAAKGLDFPNQRLLLNNSTLLALTTLDKKVTGAQIITPNGEKKLLSGSQKKGAFISVSELEDHPDTVLITEGYATALTANLLYKGTVLAALDAGNLYSVAKAIRERWSDTKIILAADNDWHHPDELDKHGKLKVNIGKISAEKAALAVKGWVTLPPTEYTADWDDYRQQHDVERAKLAFSQGLYQPVPTKKKATTQPNDTESSKLTLCQMGASQRGEVLLARYDGDLALDGASETVHHYDGIVWRPVSDRDLKREMVAAFMEEKLPYSPHGISSAVDALKLQLPMMQLPERHLIGFSNGVFDLKACQFRPHRKSDWLLLANDVAFNPPVSGETLKNHAPQFWRWLNRATANCENKFDRVLAALFMVLANRYDWQLFLEITGAGGSGKSIFAEICSMLAGKGNTVSASMAALENPRERALIVGYSLIILPDQTRYVGDGSGIKAITGGDEVAIDPKHKQPYSTRIPAVVLAVNNNAMSFSDRSGGVSRRRVIFNFSEVVPENERDPLLRDKIATELPVIIRHLLYRFADPQVARRLLAEQQKSDEALDIKRGTDPLVDFCGYLIASNETDGLLIGNAEIVPFNPRKYLYHAYLAYMKGNNLNKPVSVTRFGMDMPGALAEYGQHYLRKKSKYGIRSNLSLNIDTAIEWMPKLTRNDQLEE

SEQ ID NO: 4529 - protein, 404 aa, Xenorhabdus sp.
MKLTARQVDTAKPKEKPYKLADGGGLYLLVNPNGSRYWRLKYRIAGKEKLLALGVYPEISLAEARTKRNDARRTLSDGNDPIEEKRAEKAAKVFAVSNSFESIAIEWHEYKRPNWSQGYAEDILEYLKKDIFPYIGKRAVTEIKPAEMLAVLRKMEQRGVLDKLKKTRQACRQIFTYAVITGRAEFNPVTDLASALKAPKQKHFPHLLADQLHDFLIALSGYSGSPVTQSATRMLMLTGVRTIELRESEWTEFDFDNDLWQIPAERMKMRRPHIVPLSNQVKTILIKLHEITGRGKYVFPGRNDAGKPMSEAAINQVIKRIGYDGRATGHGFRHTMSTILHEQGYNTAWIETQLAHVDKNSIRGTYNHAQYLDGRREMLQWYADHMEMLERGENVLIGKFGKRA

SEQ ID NO: 4530 - protein, 384 aa, Xenorhabdus sp.
MPKKITPLSPTTVSNAKAKLDSKTGKPKDTIYRDGDNLELLVKASGIKLWYFRYYKPFTQKRTMIAFGEYPSTKLADARRLKDEAKAMLAKDIDPVDWCKQQTAAIQEENSNTLRNIATRWFEVKKTTVSEDYAKDIWRSLEKDIFPKLGDVPISNLKAPMLVEVLKPIEARGNLETIKRLTQRTVEIIDYAMNLGVIDANPFTTVSKAFPKPKKKHNPTIRPEELPGLMQALSVAQVERQTRLVIEWQLLTAVRPGEAVKARWSEIDFENKVWNIPAETMKTSHAHTVPLCQPALDLLEIMKPISGHREFVFPHRSTPSTHMSSQTANMALKRMGYQDMLTAHGIRSIVSTAMNEQGFMPDAIEAVLAHREKNSVRAAYSPIE

SEQ ID NO: 4531 - protein, 85 aa, Xenorhabdus sp.
HGDSMSPVIPNGSTVTVITGCKKIIDGSIYAIEQGDLLRVRILLRQPEGKLIIRSYNSVDYPDETADANTVNIIGRVFNWSVMGW

SEQ ID NO: 4532 - protein, 779 aa, Xenorhabdus sp.
AMYHWENLLPACGIDIPAKGKHGACPVCGGNDRFHFIDDHHYGNWHCRQCDAPNFGDGLDLVAKTKGISIFEAAKVVVDALALPVPESKLAKTLTRNAKPIAERIAALVATAVAGESQYLVKKGLQCSNQRMLKDGSLLLVTQTLDGAITGAQTIKPNGEKRLVVGTQKKGSFILVTEITGTPDTIIITEGYATALTVSQLHKGVVLAAIDESNLLIVAERAREQYPNSKIIIAADNDRHEPEEQDKNGRLKKNVGKIAAEKTAKAINGWVTLPPTEYKADWDDYRQQHGVDMAKQAFTQGLYQPTSTKKKAAIQLNNDAELSKLTLCQMGASQRGEVLLSRYNGDLALDGASETVHHYDSIIWRPVSDRDLRREMVAAFMEEKLPYSPHGISSAVDALKLQLPMMQPPERHLIGFNNGVFDLKTCQFRPHRKDDWLLLANDVEFNSPVSRETLQDHASQFWRWLNQATANCENKAYRVLAALFMVLANRYDWQFFLEITGAEGSGKSIFAEICSMLAGKGNTVSASMAALENPRERALIVGYSLIILPDQTRYVGDGSGIKAITGGDEVAIDPKHKQPYSTRIPAVVLAVNNNAMSFSDRSGGVSRRRVIFNFSEVVPENERDPLLRNKIAAELPVIIRHLLHRFLDPQTARCLLAEQQKSAEALDIKRGTDPLVDFCGYLIASHEADGLLIGNAEIMPFNPRKYLYHAYLAYMKGNNLNKPVSVTRFGMDMPGALAEYSQQYLRKKSKQGIRSNLSLNLDTAIEWMPKLTRNSQPEE

SEQ ID NO: 4533 - protein, 103 aa, Xenorhabdus sp.
LRPHIISSILEHAKADYPNECCGLVIQNSRKQQYIPCRNTASVPTEQFSLHPEDYATAEDAGTIVAIVHSHPDATTQPSQLDIAQCDLSQLPWVIVSWPEGDK

SEQ ID NO: 4534 - protein, 246 aa, Xenorhabdus sp.
MSMQADLQRLVPGSKVLLFTLDGSAFGGPELYFHSHPIPYTQTELTDPDKLPVKSLWWQGLEYKPWPVEIKGLEIQSDGSTASPALKVANLDGTISALCLAYQNMVQARITIHMTFVHYLDARNFPEGNPEADPTQEKIDVFYIDSKTHEDNESVQFALSSPADLQGIQIPTRQIHGLCTWCMRGLYRKSPCNYTGTRYFDEEGNPTDDPSKDVCSGLLSTGCEPRHGIGNQLPFGGFPGSALLRR

SEQ ID NO: 4535 - protein, 263 aa, Xenorhabdus sp.
CSKVERKKALYQTYADAEVISQQRKGELILAAERDTDSKRIEAAKQVFASQGELQSLAVTMFETTQERMGNMVTGLLTGSKSLREGMSELFASLAQDVVKSLVKMAAQALITNTIMKGMGSMGGGGMFSGFASMFTQNAKGGVYTSANLSQYSGQIVNSPTLFAFAKGAGLMGEAGPEAIMPLARTSNGSLGVRLVGQNLNTAGAAPQVYITISNEQTTQTTSPGWEQFGSEIGRFVEQRYRELMNRDLGQGGVLNRAIRGGR

SEQ ID NO: 4536 - protein, 163 aa, Xenorhabdus sp.
SNTPPEFKDLWQTPLPLFKALDLEFNFTLDVAASAQNTLCTHYLTERDNALESDWVSYGAIWCNPPYSNISPWVEKAAIECQKQLQPVVMLVPSDTSVGWFKLALETVDEVRLITGGRVQFIPVEQRKRNSNTKGSMFLIWQPFITPRKLITTVDKEYLFNIG

SEQ ID NO: 4537 - protein, 147 aa, Xenorhabdus sp.
PKMKLNARQIETAKPKEKSYKLADGAGLYLEITPRGSKYWRMKYHRPTDKKEDRLAFGVYPAVSLADARAKRDEAKKLLAQGIDPKAEKKDAQAESKGAYTFERIAREWHASNKRWSEDHRDRIMRGFEQYIFPYIGTLDIRTLRSK

SEQ ID NO: 4538 - protein, 273 aa, Xenorhabdus sp.
MENRKITFIGAGNMAHAIIAGLINKGYPAKQITACSPNTIRRDVLAEKYGINSQSDNIRYAQEADVIVLAVKPQMMEEVCSSLRSQVNFEQKLVLSIAAGIPLSRFYSFLQENLNIIRIMPNTPSLIGQGISGMFAPEQVNQSDRQFAEVLMNSVGKVCWVNDENGINDIIAVAGSAPAYFFLFMESMQQEAERLGFDSQTARELVLQTAMGSAKLAESQAELPFAILREQVTSKGGTTAEALRVFYENHLPEVVSQAMQGAIRRAQEMEKLF

SEQ ID NO: 4539 - protein, 65 aa, Xenorhabdus sp.
QQDWHPAEIICALRKRGTTLAALSRESGLSSSTLANTLSRSWPKGELIIATRLGMEPAEIWPSRY

SEQ ID NO: 4540 - protein, 423 aa, Xenorhabdus sp.
MKLNARQIETAKPKEKTYKLADGGGLYLEVSPRGSKYWRMKYYRPTDKKEDRLAFGVYPTVSLADARTKRDEAKKLMAQGIDPKAEKKGTASPAKVSSFEEIACAWHASNKRWSDSHRQTVLRSLEQYIFPHIGARDITTLRTSQLLAPVKTIDEQGKHDIAQRLRQRVTAIMRYAVQNDILETNPANDMTGALTTTKSRHHPALPHEDLPDFLNRLSVYRGRLLTKIAVELALLTFVRSSELRFARWQEIDLENAVWKIPATRQPIKGVRFSERGMKMKTDHLVPLSRQAVRLINALHELSGNCEVMFPSDHNSAKVMSENTVNKALRAMGYDTQTEVCGHGFRTMARGAMGESGLWSDDAIERQLSHIERNNVRAAYIHTSKHLDERRLMVQWWADYLDANREKSITPYDFAKPLRDRKNR

SEQ ID NO: 4541 - protein, 683 aa, Xenorhabdus sp.
VGNPKPLDLIQTVKTSAMYSWQNLLPACGIDIPAKGKHGACPVCGGTDRFHFIDDHHHGNWHCRQCDAPNYGDGLDLVAKTNRITITEAAKVVADALALPLLESKPAREITDPTPSIAERVATLMKQTVAGQSPYLTAKGLHCPNQRLLSDNLVLLPLTTLNKKITGAQIIKPNDEKKLLSGSQKKGAFIALSEMEEFPDTVIIAEGYATALTVNQLYKGNVLAALDAGNLFSVAKAVRERWPDVKIIIAADNDWHHPDELDTHGKPKVNIGKLSAEKAALAVNGWISLPPTTHKADWDDYRQQHGIEAVQQAFSRALYQVREPISSDAIETRRYDNVGSIYPNRKTKLPLSVGSEGFDAQLDYVVKGIIPAHSLCSIYGASGSYKSFLAGAWGCHIATGQAWAGKSVAQGAVLYVVGEGGIGVPRRIKAWEIVNNQTVENMYLINTPVFPASPAEVHELVIAAQQVEAETGQPVRLIILDTLARCFGGADENDSKDMGAFVRGCDELKAKTGASILVVHHSGKDESKGARGSSALRAALDVEYKISREGKKGGSLVITCTKMKDAEEPDTKAYDMRVVELFTDKDGEEITSLTLIDRPRDPVEEEEISHVSNKTDNHTALWQCIRSRTALKEPCSIALVRDDLKSMGVNVKNFSRWLTKLEQDGLITRHGQELSIVNQNNED

SEQ ID NO: 4542 - protein, 281 aa, Xenorhabdus sp.
VNWDDLRFFTALVECRTVSAASKRLNVNYATVSRRTERLEHTLRQRLFDRTQDGYIPTIEGLLLYKKTVQVRENIESLEDYFTQEGKFKKSVVISMVSLMAEYLLIPKLSHFVKKYPEIRLEIDASNRNVSIPSKEADIAFRLDLPEKGEYLSQKVGELNYKLCAIPEVIKKINDKENVNIITFNSDFSELPESQYLIKRFGNKSIRFQSNSVTTQRIAAENGYGVALLPSLIIKNSPLVSIELDEPVIRPIWMLTSKQTMHMTASRLVADELRSIFDEMR

SEQ ID NO: 4543 - protein, 237 aa, Xenorhabdus sp.
ANDMAGTLTIVKPKHHPALPHERLPEFLTRLSCYRGRLLTKIAVELTLLTFVRSSEIRFARWEEIDLERAVWHIPATRKPIDGVKHSQRGMKMKTEHIVPLSHQAISLIETLHNLSGESGVMFPGDHDPKKVMSENTVNNALRTMGYDTKTEVCGHGFRTMARGAMGESGLWSDDAIERQLSHIERNNVRAAYIHTSKHLDERRLMVQWWADYLDANKEKFVTPYDFAKPLRDRKNQ

SEQ ID NO: 4544 - protein, 779 aa, Xenorhabdus sp.
AMYHWENLLPACGVDIPAKGKHGTCPICGGTDRFHFIDDHHNGNWHCRQCDAPNYGDGLDLVAKTNRISITEAAKVVANVLALPLPESKPAKETIQTTQPIAEKVAALMTLTVAGESPYLTAKGLHCSNQRLLKDGSLLLPLVTLDKKVTGAQIIKLDGTKKLLSGSQKKSAFIALSKLGEHPGTVIITEGYATALTVSQLHQGTVLAAIDAGNLLSVAQSVREHWPDTKIIIAADNDWYLPDELDKNGKPKKNIGKIAAEKTAKTINGWVTLPPTEYKADWDDYRQQHGVGIARQAFTQELYQPTLIKKKAAVQLNNDTEPSKLTLCQMGASQRGEVLLTRYDGDLALDGASEAVYHYDGIIWRPVSDRDLKREMVTAFMEEELPYSPHGISSAVDALKLQLPMMQPPKRHLIGFSNGVFDLKTSQFRPHSKNDWLLLANDVEFNSPVSGETLQNHAPQFWRWLNQATANCENKADRVLAALFMVLANRYDWQLFLEVTGAGGSGKSIFAEICSMLSGPSNTVSASMAALENPRERALIVGYSLIILPDQTRYVGDGSGIKAITGGDEVAIDPKHKQPYSIRIPAVVLAVNNNAMSFSDRSGGVSRRRVIFNFSEVVPENERDPLLRDKIAAELPVIIRHLLHQFADPQLARRLLAEQQKSAEALDIKRGTDPLVDFCGYLIASHETDGLLIGNAEIMPFNPRKYLYHAYLAYMKGNNLNKPVSVTRFGMDMPGALAEYSQQYLRKKSKQGIRSNLSLNLDTAIEWMPKLTRDSLPEE

SEQ ID NO: 4545 - protein, 598 aa, Xenorhabdus sp.
KGRMAKYSDELIKVAKSLYLRRYTPAEIAAELNLPNRRIVYYWAEKWHWADMLSHESVIEAIDRRLVLLSERNNKTTLELDEYDRLVAHHVKLIAQENKHKEKLADIKARAQSGNEGDYVATGDGEPKKKKRYRKNDISALTEEDFQTFVDGNLFGYQKHLRNNKHKPIRNILKSRQIGATWYFAFEALEDAVLTGNPQIFMSASKPQAEVFRSYIVNFAEQFFGVTLTGNPIRLSNGAELRFLSTNKNTAQSYNGHLYCDEYFWIPDFKHLNEVASAMATIDKWRTTYFSTPSAKTHSAYPFWTGDAWRGNDAKRKNVDFPTFNEYRNGGRDCPDSQWRYVITMEDAIKGGYNLANIDRLRNKYNADTFNMLYMCQFVDSGASVFKYHQLEKCGVDINLWEDHNPDASRPFGEREVWGGFDPARSGDTSTFVIVAPPLMAGERFRVLATFYWQGMNWKHQAKLIEALFKRYRFTHIGIDTTGIGHGVYEMVQDFAPRQTQAIHYSQQSKNQLVMKMIDVVSEERLEWDGEQKEILASFLAIQHTTTAKGGAMTFVADRSQETGHADVFWAIAHALMNEPLNHEKKRTSKYSFSKATQ

SEQ ID NO: 4546 - protein, 307 aa, Xenorhabdus sp.
MTDYQKIWYDNDYDHYTLPIDRLALAQLTNMNGQHGGVLYARHNMIASDYLGGGLTHEQFRSAMMNFLIFGDVALLKVRNFWGDIVRLEVLPSLYLRRRKDGDFVILQEGEPLVYTPEEVIFIKQYDPQQQVYGLPDYIGGIHAALLNSEATIFRRRYYHNGGHTGGMIYINDPNISDEAEKEIENKLAQSKGIGNFETMFVSIPNGDPDGIKFIPVGDISANDEFANVKSISSQDVLTAHRFPAGLAGIIPTNVGGLGDPEKARDAYRKDEVIPVQNMFMNAINSSDIPETLFVHFKKDNDSSSAE

SEQ ID NO: 4547 - protein, 97 aa, Xenorhabdus sp.
MEEHEKTFVTLVLLGALIALGKMLTGNEPITLRLFIGRIILGSAVSVMAGALLIWWPGISPIAVTGIGSALGIAGYQLIEVWLRKRGSALLTGKLKK

SEQ ID NO: 4548 - protein, 151 aa, Xenorhabdus sp.
MSQRISGQSVDFNMDGDLVHAEKVNLSITDNTAAAQTQGVPDGYIAGDVAAEGEIELSTKYLEIVTAKARSAGSWRGIQPVDLMWYAKAGNEEIKVEAYGCKLIVSDILDVDPKGGSVMTHKVKFVVTSPDFVRINGIPYLEAELTQSLIG

SEQ ID NO: 4549 - protein, 373 aa, Xenorhabdus sp.
MWPHVQVNQVNQLQGETKEIERVLLFVGTGKTNVGKTIAVNTQTDFDAVLGTTDTALKRQVRAAMANAGQNWSGYVHILPELADERAFVDAIIAAQTIASVEGYVLTSGATKDVIKAAQTLRANTIAKFGRWQWAILSVDGPQSKEPWADYVTRLAELQKGEAVSSVQLVPCLWGNEAGVLAGRLCNRAVTVADSPARVQTGPLLDLGASDFPKDGTGKSIDLATLQALEKLRFSVPMWYPDYDGLYWSDGRTLDVEGGDYQSIENLRVVDKVARRVRLQAIAKIADRSLNSTPGSTATHQAYFARTLREMSRSTEINGVTFPGEVKSPKDGDVVITWRNKNTVEIYITIRTYECPKGISVSLLLDSSLEKSA

SEQ ID NO: 4550 - protein, 635 aa, Xenorhabdus sp.
WQHFIMAVSLASVVGIAQADSLEAQRERYQAIKLAWDAKNMQEVERLMPTLKHYPLYPYLEYRQLVHNLKMTSPQQVRHFIDTHPTLPPANSLSSRYINLLASDGNWHSLLAFSPHKPNTVAASCNYYFANWVTGKHKTAWEGAREIWLRGSSLPDDCDSLLNVWERSGYLSVNLILQRIELAVNENNTTLANYLINRLPFDYHSLKAHLQKLQSDPTSVEHFARTVKPTNFTRFFVTNAFSHFARKNTEKARLSIPSIARAQKMNETERQKLKDIVAWQLMGEITPEQEKWRDNAIRASHSSTLIERRARLALRNADEKGLAEWLSLLPKNVLQKDEWQYWSAITLLNTGKKKEGDLILRKLMEHRGFYPMVAAQKLHLPYPLVINKSERPDASIAKLPQIKRIRELMYWHMDDLARSEWINLVSAQNSTKKEQLARYAFEQNWPTLSVQATIVGKMWDHLEERFPLAWQNEFAHFTSDKSISQSYAMAIARQESAWDPQARSPKGASGLMQLMPATAEHTAKSKKIDGYASSNQLMNPTMNIKIGTAYLESVYQNFGNNRILASAAYNAGPRNVERWLANSAGNINAIAFIESIPFAETRAYVKNVLAYDMFYHNFMGNLVNVLTDSEWQRRY

SEQ ID NO: 4551 - protein, 194 aa, Xenorhabdus sp.
MGALSDSYDFYDDEIGSYEWVSAMQGRWGSTTQLKDFNYYYDIQKEASKEIKNVISKSGEYKDIKFEASKEIKDIVNKYAIKYDVDPTLVMALIKQESEFKKDAISKKGAKGLMQLMDVNSKPHNIDPYDPDDNVKIGTALLARLINKYDDVKIALAAYNAGEGAVKRYGGIPPYKETKKFVKNIMTTLGEDAD

SEQ ID NO: 4552 - protein, 54 aa, Xenorhabdus sp.
HKSGKIVPYRVELIRRIGQAAVDAIESNHDRHRWTIEECQSIRDKYKEKLRELR

SEQ ID NO: 4553 - protein, 144 aa, Xenorhabdus sp.
MKISENGLSFIKQYEGLKLKAYPDPATGSIPWTIGYGHTKDVKPGQIITEQQAEAFLHDDLKPIYITLESAVKVPLTQDQFDALCSFIFNCGAGNFVRSTLLKKLNAGDYQGAADEFQRWNKAAGQVMKGLTQRRASERQMFLS

SEQ ID NO: 4554 - protein, 147 aa, Xenorhabdus sp.
VIIALIIASGAAYLYRSGYKKQLGINNDQLTEIQQLTDRINYQNTHIDMLHELDSKHTQELANAKTEINTLRADIAAGRRKLRIKATCPVSETTASGRVVNDTTVELSRETGQAVLDIREGIINDRAKLRYLQDYVKAECGGDNGKY

SEQ ID NO: 4555 - protein, 194 aa, Xenorhabdus sp.
MSTALTFKEHEIVPFDNKDGKIWFTSKQMAELLEYKSEKSVTNLYNANKDEFTDDMTMVTESMTIGINNSLRKKKVRIFSVRGSHLIGMLADTDVAKSLRRWLLDLAEKEHQPHNLALMDMKSLKELTIGEMQNRLVSANKWSYENFGQKGSDLMNLRKRHLKKIRKAEKAILELSQLTLPGLDDFPDDEGEPA

SEQ ID NO: 4556 - protein, 291 aa, Xenorhabdus sp.
MHGNTPVITTELLAHLYGTDTDNIKKNYSRNAERFIEGKHYFKLTGNDLRSFKHKVTDSPFVKIAGNVRHLMLWTERGSARHAKIIETDKAWDIFEKLEDHYFNQNEPKPRKQPKQIAGRITPDQQEAIKQLVLNRGKALPKESQAKAMITMWSALKTHFGCTYKEIESEQFAEALSLAARVPLEGELLLKEELPVPKAEQQISDSDLQTLCWLWQHSVDMANYMMNIEPLLQLAEHKLAGAYATHPQIAIKCANSARQILEKASEHIQIKAIQMDNWMVLHNLRKPNYPF

SEQ ID NO: 4557 - protein, 268 aa, Xenorhabdus sp.
SVEHMIPIMHNNVPVITTELLADVYETDIVRIRQNHARNKGRFCEGKHFFTVKGNELQEIKNRVSLSYSVDNRLTNCQLVGKNARSLTLWTERGAARHAKMLDTDKAWDVFGKLEDFYFNLKGVESKTTTYDRTPLRGLVNTLMGKYGISDRTLFQMVHREFGVNHIDELSHEQLPSAIAYLATKVIEGEFLGKEALPISQQIDLSFELSNVNALYKNIMNFKEVWETFNPHFTILTPDIADAFNGAFNNLCGPISILRNRLERRFAC

SEQ ID NO: 4558 - protein, 398 aa, Xenorhabdus sp.
LSDKKLRTLHGKERGNIEFFADGAGLSAKASKAGGVSWVFTYRLDGKKLNRLTIGRYPDVSLKQARETRDKCRSWLASGKDPKLQFNLVMQESLKPVTVKDAIEYWIEHYGRENRVNIDTLILQLEKHIYPYIGEMALSDCETIYWLQCFDRMKKKAPVAAGSVFQLCKQTLKFCRVRRYAVSHVLDDLTIQDVGKKQNKGQRYLDDHELGQLWDSINTGIYLPYYNNLLKILVVFGCRTREIRLSKCSEWNLNSMLWTVPKENSKTGEKIIRPIPEYMKPFLMDIIHQNHKSGYLLGEIKKLEAVAQYGRKIWKKLEHDEEWSLHDLRRTFATKLNDIGIAPHVVEQLLGHALPGIMAIYNKSQYLPEKLDALNKWCERLDVLAGNYENVVILKAAQ

SEQ ID NO: 4559 - protein, 805 aa, Xenorhabdus sp.
MSQGNNNQKSRPLDVIRTVKTSAIKHWQSLLPACGVDVPAKGKHGACPICGGTDRFHFIDDNHHGDWHCRQCDAPNHGDGLDLVARTKGITVFAAAKLVADALALPLPEPKPAKEQPRTVKPITERIAALVATSVMGESQYLTKKGLQCPNQRLLKDGSLLLVIQTLDGKITGAQTIKPNGEKRLVSGTQKKGGFIPVSEITGTPDTFIITEGYATALTVRQLHKGVVLAAIDESNLPTIAELVRTQWPNAKIILAADNDWHEPEGRDKNGRLKKNAGKIAAEKAAIAINGWVTLPPTALKSDWDDYRQHHGIEAAKQAFSNGLYQVGEKKLMEVEEVIIHETKSKKAKNNLAQMAASQRGALLVERYGKVAVNPDSEMVYHYNGTTWETVSDNELRRAMVAIFDQHETPYSPNGINNAISAMKLQIPVIGEPRQDLIGFSNGVYDLSEQQFIPHQLEHWLMNHNGIEFTPPAIGENLPNHAPDFYRWLSHAAGSNENKMNRIKAALFMILANRYDWQLFIEVTGEGGSGKSVFTYIAALLAGEHNTASGNMKALDEARGRYQFVGKSLITLPDQVKYVGEGAGIKAITGGDLIEVDGKYEKQFSTVIKAVVLATNNEPMSFTERNGGIARRRVIFPFNIPVKESEKDPHLPEKISRELPVIIRHLLNEFADQNKAKKLLQAQRDSNEALTVKSNSDPLYRFCGYLVTVNDATGMKMGTKNISPRAPRLYLYHAYLSFMEAHGFERPLTLTKFGESIPKIMQEYRKDYRKTRTTRGYSYNVELSEEAEEWLPSLPEHKDLNIIPL

SEQ ID NO: 4560 - protein, 384 aa, Xenorhabdus sp.
MKKLLELRQQKNDLTQQMRSLLTQAENEKRSLNADEAKQFDELRSQSDNLNTEIARYEALSDEERSQAKNQPINNKLNNDELRHYILTGETRSLSTGVPADGGYTVIPELNKQIMQQLADESVMRRICTIKTTRSNEYKQLVSVGGAAVAHGEEGKARSETATPKMEEVSIKLFPIYAYPKTTQEIIDFSDVDILGWLTSEIADTFVDTEETDLVSGDGSKKATGFLSYPRDTQADKVREFGTLQKLEATSLEADSLIDLKFLLRNKYRKNAVWVMNSTTAANVQKLKNSNGDYIWRERLQAGDPDMLLGLPVHYLEFMPDNIIGLGDFKRGYFIVDHQTGIRTRPDNITEPGFYKVHTDKYLGGGLVDSNAIKVLEIKGTKAG

SEQ ID NO: 4561 - protein, 179 aa, Xenorhabdus sp.
MKNDFEIRTASLSASDKKLTGYVIKWNSRSQVLWDEFVEQFAPNAFSASLAASADIRALYEHDHMNLLGRTTSGTLQLAEDATGLRFELTPPDTQLGRDVLALVERGDISGMSFGFRAVKDQWDTNQTPYIRTVLEAELREITVTSLPAYPESGVEIAKRSLNAVKPCLRHYWLQLSEV

SEQ ID NO: 4562 - protein, 190 aa, Xenorhabdus sp.
MWPFKRKASETRSMTIDELFSLVGMVNTKSGEHVSPSTAEGLPAVMNAVTVISEAIATMPCYLYRVQHQHGKESREWLSDHPVDYLLNECPNDCQTPFQFKRTLMRHCLLNGNAYAVILWGKDGQPQSLHSYPPSAVVPQRLSDHRFAYTITEPYSGKIRTYPCPDESSLSPLTFMDSPMYSENRSFIED

SEQ ID NO: 4563 - protein, 181 aa, Xenorhabdus sp.
ELRGIFNGHRSIFREGVKIVSLPAHLPERLIRTTVGDCIDYDRIRDDILKDSQHFDIKLVGFDTWNATHLRTQLQGAGLDVEPFPQTYMRFSPVAKSAEVFVNRKVIRHNGDPVLVWAIANVVMETDANANIKPNKKKSANKIDPAIAFLMSFGTWQVEHEEFSFILNDEQKQRLDNFDGI

SEQ ID NO: 4564 - protein, 227 aa, Xenorhabdus sp.
MKKQDELSLVIGGKAIYGWDSVRVTRGIERLPSDFELMLMDYYPGSDEKQQVEAGQPCQVLLGNDPVITGYIDIWNSSINKSTHQIRVTGRSKCQDLVDCSAKWPQNVISRATALQIAQKLAQWYGIDVISDVADMEPLPQFTLNWGESSQEIIDRITRWSALLYYDTPDGNLFLTRVSDKVAASGVAQGKNIELADYQSSMNERFSEYIGLSMNVSGLSELSSGQG

SEQ ID NO: 4565 - protein, 469 aa, Xenorhabdus sp.
MAFIKDAVSSLLGGGSDASWQWAEHLHPASFRGVPFAVVSGESVFGRRQAVHEYPYRDTAWLEDLGRATRRITLRGFIIQDSAVYHAPDVITQRKNLVAACETGSTGTLVHPTLGELTVSVTESGLRMNESKEFGRVFEFTLTVIESGLKVFAVTNSTKSATEVKKHWLQTYTTTLAKYIAMVRGEIRSVTQGIRIIKQTANQWVGMVTRSMNEVTNLSDMLKTTFGSERYGRYQRGKIGGTVSGATGLRSRDDRQHNEAEIVRKTTAAVVMSRKTITDRLDKLNAAHTVETFSEAAGQVVIAIIDSSGSVDEKVAIFEALAAFQNTRYQQGTVDRHITEMTVLLLVVLSAGAMAQVASDFTPSSNQEAHDLQTRVCQALDTALVMAGDLGVDEVYQSLMALHHEFMISAELKGAESGRLAQFSLPTVLPALTVANRIYQDAGRSDELIQATDPRHPAFMPTRFKALRQ

SEQ ID NO: 4566 - protein, 503 aa, Xenorhabdus sp.
MSIEDTSKLTGALVQIGADADDAQQSVQNLFNVLNSAQRGENPSVLAELNNLNIPIHTTKDGSADTIPTLLAIAEKFPNMPSETQFRLSNKLGLTPELTPDVLTLIRENKIQERLDKSVKNGQSRTTEENQKLTDFNTEANELGARVDGIWNRVKIGSATWFLDKSKTTKASPQMQSVEEYKKREKDTADNFYHGNKENDIRQRALRDDEFKQQLTFKERLSLTVNKPDEGLQKKLDDKYSESWEKQKKAHEAKEVAKQIPVAQKVEAPDYPNPSKLKGAALLESMSDYFAMLEKKYGHESGLLHGVAMTESSGDPSKIGPMTYTGERAMGMFQFMPDTAKEQGLSRSDALDPYKSAEAAAKYLSLLRQKTGSTDGMLAAYNGGIGRLERRGSIRNMPPETRNYVPKVKKYMKAGAAIAEKNTNKKKPPQQEQQQQPLPSLYGQNKQVERDEEMGKRIAQAVREAIGDKTITVDINLFNDKTGERQKIQSNSAGKVTTSMKYS

SEQ ID NO: 4567 - protein, 287 aa, Xenorhabdus sp.
MFQLEHIPANKLESETTVNFWVNGRDQSALTKESVSDIIRTINLQQFFPAIGRRIDGKIEILDGSRRRAAAIFCGVGLDILVTNTNISTDDARQLAADIQTAREHNIREVGMRLIRLREGGMTQKEIAESNNMSQAKVTRAIQCASVPSKIVAMFPVIAELSYSDYKILLDVTVGIKKNRLSIDEVVSCVCDEIQHMNKTKLVAPDEMKSIIIKLFKDFSRNKAKKTAQEKPQIISLWNFKDKNSFARKRIKDRAVSFEFNRAPKEFEEELERMIQMLMQKHFNSNE

SEQ ID NO: 4568 - protein, 399 aa, Xenorhabdus sp.
QLDKVAQRSVRLLQSLSDQIQSQKQELSKTTYYQTYSKAALAKLPKLTRASVDYAVNEMEGQGYVFGKKQAGSSSKYAMTIENIIDLYHHRGVPKYRNRYHEALTFFIGNLKGGVSKTVSTVSLAHALRTHPHLIFEDLRILVIDLDPQASATMFLDHKQSIGSVDTTSAQAMLQNVSREELLSEFITSSVVAGVDIIPASIEDAFIASRWEELCAEHLPNQNIYTVLRENIIDKVKHDYDFIFIDSGPHLDSFLSNAIAAADFLMTPIPPAQVDFHSTLKYLARLPELVDIIESTGASTRLSGNIGFMSKLVNKTDHKLCHSLAKEIFGGDMLDFAIPRLDGFERCGESFDTVISANPATYIGSGEALKNAKGAAEDFAKAVFDRIEFIRANRGNNAK

SEQ ID NO: 4569 - protein, 49 aa, Xenorhabdus sp.
DDNSIRASAGIGVMWASPFGPIRVDYAVPIAKEDYDEEQRFRFGMSNTF

SEQ ID NO: 4570 - protein, 222 aa, Xenorhabdus sp.
DAEGKDISVLFKEWAKHIFTLNDKSLLEVVLLRNLKNNQSAIFIRAHHIVCDGWGINQLTKKIAKYYRNTDDNTESLSLNTEKYISSILEQEKILSQPETEQQITKLADLTQRHEPVFFNRKKKTHQSHFIQHRHLLAPAKVEKMLSQGINPYQVVMASVAILLSRVHNNTRLTIGIPFLNRRMNQLDIAGEWANTLPLAVMVNAQDTFIELAARIKADISL

SEQ ID NO: 4571 - protein, 272 aa, Xenorhabdus sp.
SDHMTLKLIFAEIALFLTGNTKILPAVLPYRNFIARTLHVPEPEHEAYFRSRLADIDEPTAPFGILKVQTDGETVAESCLTIAPELAAAIRTQARHLGVSPSVLFHVAWAQVLAKTSGRDDVVFGSVLLGRLQGGAGAEQVLGMFINTLPMRISVGDCTVQEAVQDTFHNLMLLLEHEQAPLVLAQQCSGVPQSMPLFSTLLNYRHSQTAESVDTVWTGIRILTAEERTNYPVTLSVDDLGTGFRLISQTITGIDPNRIATYLVTAINASLK

SEQ ID NO: 4572 - protein, 226 aa, Xenorhabdus sp.
  unsure (1)..(226): unsure at all Xaa locations
LGELEYATDLFDAATIERMIGYLKQVLMAMTADAMQPVARLPMLSASEQQRLLVEFNATQTRQTENPQNVLIHTLFEAQAEQHPDTTAIIHGDQVISYAELNQYANRLAHHLIALGVRTDDRVAICVERGPEMVVGLLAILKAGGAYVPLDPAYPAERLVYMLKDSAPVALLVQPSTCQAIHSDTVPVIMLDXQTPFMEEQPEHNPEIPGITDXXXXXXXXXXXXX

SEQ ID NO: 4573 - protein, 172 aa, Xenorhabdus sp.
ELIIFLCTDLRASHYPARSEFMYGEWLRHQYEEGKMLKSVCDPELTLVLAQSRQEAIPLIGPPVSDLIPVIPKSEIRRAIKDVLPGLIETLQGDERNVLLTLARMWRTLVTGEFVPKNIAADWAAARLPVIQSTVLADARKAYLSGNEEDWQSRQQELHITISSLRDCVLKS

SEQ ID NO: 4574 - protein, 201 aa, Xenorhabdus sp.
MAQLYFYYSAMNAGKSTSLLQSSYNYNERGMRTLIFTAEIDTRFGKGKVSSRIGLSADALLFSPDINIAELIRRENDAEKIHCILIDECQFLTKEHVEQLCEIVDYDDIPVLCYGLRTDFQGELFKGSQYLLAWADKLVELKTICHCGRKASRVLRFGSDGNVVYDGAQVDIGGNEKYVSVCRRHYYDVIHEAKAKKSEQV

SEQ ID NO: 4575 - protein, 695 aa, Xenorhabdus sp.
SHVVTSYTLDKEIEHWPVLPPIGRPIANAQIYILDEYCRPVPLGVAGEIYIAGVNIARGYLNRPELTAERFLIDPFSTESHARMYKTGDLARWLPDGNIEYLNRNDFQVKIRGFRIELGEIEAQLMLCHGVREAVVIAREEVINENSQKRLVAYLCPQEGVSLSPAELRQQLARHLAEYMLPTAFVILDALPLTPNGKLDRKALPAPDSSAIATRDYAAPVGETETVLAKIWQELLGLEQVGRYDHFFELGGHSLLAVQLAARVRQMLKRELPLQQLFAQPVLMDLAQAIAEADTTNQTMIAVADRSQRLPLSFAQQRLWFLGQLDPAASLAYHLPAALRLTGRLHRQALCSALDNLVARHEGLRTRFVSNENQPYQHIDAADIGFDLSSHDLRLLDTAEKNQRVAEIAEREAQTPFDFACGPLIRGQLLQLADEEHILLITLHHIITDGWSIGILVRELGVFYRAALNGQTAVLPPLPIQYADYAVWQHQSLQETVLAEQRDFWRRQLKDAPVLLTLPTDRPRPKVQTYVGNQVAFHLDNRVLSSLKTLGKRHNSTLFMTVLAGWSIVLARLSGQDDIVIGTPVAGRPYPELEGLMGIFVNTLALRIQFDEKLNVVDLLTQVRESALAAFAHQELPFEQVVEALQPERRLSYSPVFQVMLALNNTPAQQLILPELQFTPFEQTQHTTHFDLTLS

SEQ ID NO: 4576 - protein, 50 aa, Xenorhabdus sp.
MNYTKIDLNTWNRGEHFAYYRHSVKCGFSLTTKIDITDLRLSLAKTHFRA

SEQ ID NO: 4577 - protein, 903 aa, Xenorhabdus sp.
GITDQHLAYIVYTSGSTGVPKGVMSSHHALGNRLLWFVRDMWFVDDIVTFPLITALKTSISFVDSVTETLSTLLAGGRLVVFDNHEVKDPARFCAGLQHHGVNSLVVVPSFLQLLMQDRNEHALKSVRILICSGERLAPELAQQVVTNYPWLRLFNFYGSAEINGDATWYEYDAARGVPDASVIGRPIANTRCYILDPDRQLVPSGVTGEIYIAGAGVARGYLNLPELTAERFLADPFSSIPNARMYKTGDLGRWLPDGNIEYLGRNDFQVKIRGFRIEPGEIETQLMQCHGVREAVVIAREKASTAEKTGSQKQLVAYLLAQDGIELTPAQLRQQLAQRLADYMLPSAFVILDAFPLTPNGKLDRQALPVPDQSAVITRSYEAPAGEMEIALARIWQTLLGLEKVGRHDHFFELGGHSLMIVNMIDRLHNIGLRLDVRNVFAAPILSELAQAILVYQRDTPAFVVPPNLITADCTAITPDMLSLVSLSQSEIDAIAATLPGGVSNIQDIYPLAPLQEGVLFHHLLQTHGDDYLLQSLLAFDSRERLDTFLAALQHIIDRHDILRTSAYWQDLAQPVQVVWRRAPLHIHHFIPTTENEVLSQLSAHTDPHHNRLNLNLAPLFSADIAYDAAQDEWLLSLRFHHLVSDHMTLELIFAEIAQVLQGQSELLPVALPYRDFIARILNVPVSVHENYFRTQLADFTEPTAPFSIVRIPNDNRVIHQSHLAVDPALAKHIRTQARHLGVSPSVLFHVAWAQVLAHTSGHDDVVFGSVLLGRLQGISGVKRILGMFINTLPVRISLTDRNLQKTASVQEVVQATYRNLTNLLEHEQAPLALAQQCSGVAQPMPLFSALLNYRHSQSNETETVSTTWEGIRVLAAEEQTNYPVTLTVDDLSEDFQLKAQT

SEQ ID NO: 4578 - protein, 109 aa, Xenorhabdus sp.
RNVMSYQCPLCHSPLLFSHHQWRCENNHQFDCAKEGYVNLLPVQHKRSKEPGDSAEMMQARRAFLQAGYYQVLQQKVIELFDCFLPEQAGVLLDIGWEKGITLLRYNRL

SEQ ID NO: 4579 - protein, 568 aa, Xenorhabdus sp.
AQDEIDLIAAGIPGGATNIQDIYLLAPLQEGMLFHHLMQTQGDVYLLHTLFAFDNRKRLDDFLNALQQLINRHDILRTAICWEGLTQPVQVVWRQASLHIKTFMPDTDSSEGISAQLLAYTEPCQRRLDINQAPLFSADIAYDPHQGEWLLAFCCHHILNDHMSLDHIIAEIRELLHQRIEPLPPALPYRHFIAQSLRIPIADHEAFFREMLADVDTPTAPFGILDIYSENRRIIEVIKPLSASLSRAVRKQASRQGVSPGVLFHVALAQVLAKISGRDDVVFGTVLLGRMQGNTGIEQTLGLFINTLPVRIRLEKNSVQETVKAAYRSLTQLLEHEQASLAQAQRCSNIAPPLPLFNTLLNYRHSQSNVTNTLWEGIHLMTGKERTNYPLYLAVDDLSKGFLLSAQSVAGIDPAYLITCMTTTLSDLVQALENEPQKPIIDISTLPTTEHRKLLENFTTAQTDLPPAMQISAQSAAVAYQAPLGNVEIALAEIWQELLEQKQIGRHDNFFALGGHSLTAVQLLSRMRKQNMEIPLALLFSHPTICELAEVINQHYSVGIKNSSGGNN

SEQ ID NO: 4580 - protein, 376 aa, Xenorhabdus sp.
FMFYLAGLSMLGYLAIDMYLPAFDAMSKDLNTSKGAISASLSIFLGGFAVAQLLWGLLSDRLGRKPVLIIGLSLFCLSCLGILWITDATQLLVLRFIQAVGVCSAAVSWQALVVDRYDAERTKRVFAMIMPLVALSPALAPLLGAWLLSHTSWRVIFLVLMVVTLLLLIPTLFLTNKRVPIDTSANNNSASFFTLLKSSVFSGNVLIYASCSAGFFAWLTGSPTILNSMGYDATDIGLSYIPQTLAFMVGGYGCRILLEKVKSETIFPVLLAGYAISMVLIYLAAWFYPSFIVILIPFCVMAAMNGASYPIAVANALSVYPKDSGKAAALQNALQLGLCFIASMLVAMFMKNPLISTTTVMVATIIPMVIGYYLQK

SEQ ID NO: 4581 - protein, 117 aa, Xenorhabdus sp.
MTQLTPLHFFKYLSDETRLRIMLLLRETGELCVCDISTALQEPQSKTSRHLAMLREAGLLLDRREGKWIYYRLSPHLPVWAANVLEQAFQCQQAEVAQLSTRLQKINSTTNGKSVCQ

SEQ ID NO: 4582 - protein, 1335 aa, Xenorhabdus sp.
NLTVAGLKALKQQQLWLDFNQTQALFLPTDSPQSALIHQLFETKAMHHPDDIAVVHGQQSLSYGELNRHANRLAHHLIALGVRPDDRVAICVERGLEMVVGLLAILKAGGAYVPLDPAYPSERLAYMLKDSAPVALLVQLSTCQVIHSDMLPKSAESLPKVLLDIQMPFMEEQPEHNPEISGMTDHHLAYVVYTSGSTGVPKGVMNSHHALSNRLLWFVRDIWFVDDIVTFPLITALKTSISFVDSVTETLGTLLAGGRLVVFDNPMVKDPARFCAGLQHYSVNSLVVVPSFLQLLMHDRNEHTLKSVRILICSGERLAPELAQQVVTNYPWLRLFNFYGSSEINGDATWYEYNAERGVPDVSVIGRPIANTRCYILNPDRQLVPFGVTGEIYIAGAGLARGYLNLPELTDERFLPDLFSSQPNELMYKTGDLGRWLPDGNIQYLGRNDFQVKLRGFRIELGEIETQLLQCRGVREAVVLVREDEPNQQRLVAYLRSHEGTELIPAELRQQLSLHLAEYMLPGAFVTLETFPLTPNGKLDRKAFPAPDSAAIVTQNYVAPVGETETVLAQIWQELLGLERIGRYDHFFELGGHSLLAIQLAGRIRQMLGRELPIQKIFDQPVLVALAHTLADAATTTQVIIPSANSNQLLPLSFAQQRLWFLGQLDPAASLAYHLPAALRLTGLLNRQALTSALNHLIARHESLRTRFISIDGHPYQHIDPADIGFSLPCHDLRQLDSALQIRRVTELVDLEARTPFDFAQGSLIRGQLLQLADGEHVLLLTLHHIITDGWSLGILVRELGDFYQSALDGSDNPLLPLPIQYADYAVWQRDQQQQVALNAQRDFWCRQLADIPALLTLPVDYPRPAVQSYVGGQVPLHLDARLLTLLKELGQRHNTTLFMTLLSAWSIVLARLSGQDDIVIGTPVANRPHKELEGLIGFFANTLALRVKFSRELKVTDLLAQVREQSLAAYANQNLPFEQVVEALQPERSLSYSPIFQVMLTLNNTPPQKLVLPGLQLSSVEQSHHGAYFDLTLSLTETESGLAGALIYAADLFDHTTAERMTGYFTNILAAMVSDESRTIATLPIISEPEKRQLLVDFNATQVSYPQNALIHPLVETQAEQFPDAIAVEFEDQTLSYGELNRRANQLAHYLMTQGVRPDTRVAIYLERSPEMVVGLLAILKAGGAYVPLDPTYPAERLAYMLKDSAPVVLLTQTVLLTRTALVETLNPECTIVLLDEPQPYLAGQPDHNPDTQAMGLQPHHLAYVIYTSGSTGLPKGVEMPLMTLSNLLQWQRQADSCLSRNGKTLQFAALGFDVAFQEIFTTLSEGGCLMVNE

SEQ ID NO: 4583 - protein, 348 aa, Xenorhabdus sp.
VSSTLLELNGFYNIYVVQQHKQKLRRFTMSSSEGNPVPPTSNQPQKNMRNKKPSRRNALILISLLFLIVGVIYAIYWYLFSRHQQETDNAYVTGNQIQIMSQVSGSVTTVYFDNTDFVKSGSVLVQLDPTDAELALKKAQNGLAMAVRNTQQQIVDSEKYQAVITQKKIALRKAQNDFDRRKILGSREVIGKEELQHAYESVALAQADLNVAIEQYNSNQAVILHTPLEKQPAVEKAASDVRDAWLNLQRTKIVSPVDGYVSRRNVQIGSRINTGTPLMAIVPATGMWIEANFKETQLVNMRIGQPAKIVSDFYGDKIVYTGKVVGLDMGTGSAFSLLPAQNASGNWI

SEQ ID NO: 4584 - protein, 506 aa, Xenorhabdus sp.
VPYRLALVTISLAMATFMLVLDSTIANVAIPTIAGNLGASNSQGTWVITSFGVANAISIPITGWLAKRIGEVRLFIWSTALFTLSSWLCGISGSLEMLIAFRIIQGLVAGPVLPLCQSLLLNNYPPAKRNMALALWSVMVVVAPICGPILGGYISDNYHWGWIFFINVPLGIGIIFVTMKLLRSRETKTEIKPIDTVGLILLIAGVGCLQIMLDKGKELDWFNSTEIIILATIALISLVLLVIWELTDDNPIIDLSLFRERNFTIGTLSISLAFMLYFGSIVLLPQLLQEVFGYTATWAGFAAAPVGILPLLLSPLFGKYGHKVDMRVLITFSFIVYAICFYWRAYTFESGMDFAAAAWPQFLQGLAMACFFMPLTTITLSGLGPERMASASSLSNFTRILSGSIGTSITTTLWTQRESMHHANFTEQITPYNPNYQQVHQQLSQLGMNDQQIAAYLAKEITHQGLIISANEIFWISAGIFLILILLIWMAKPPFVAGKQGSGGAH

SEQ ID NO: 4585 - protein, 1570 aa, Xenorhabdus sp.
MKNAVQIINEALNQGITLFVIDNKLKYKTNRDSIPPELFEEWKQYKQELIDFLNQIDSEDDMDTHRLPDIPRYERAEHYPLSFAQQRLWLIDQFTNGSPQYNCSGDFRLRESINFNAFEAAIATLLERHESLRTYFKVINDEPRQIIATSYDLPITMHDLSSLSESEKERQVKQRGEEEWKQSVNLSTDLMLRIQLLKLAEDDYIILYTIHHIACDGWSIAIFFSELLTLYRAYCRGESNPLPPLKAQYTDYAQWQREWLQGDILEKQLDYWQNQLSGISPLHRFPLDNPRPEKQNLEGNVYPQRISKTLTQEIRTLCAKHKVTLFMFLETAFAVLLSRYSSEKDILVGMPVAGRRHRDVESLIGFFVNSLVIRTDLSGQPSFSELLKQNSRTILDAYAHQDLPFEMVVEKLSPERQLNHNPIFQIIFAVQNNQRDATLEQDILVETEEHSLLTTRFDLEVHIYEEKYEGELFIQWIADSSLFNHATLDRLLVNYETLLTNIVNVMKHHTGNSEPSVHDIPLLADSERNTLLHEWGEPQVPYPTGKCFHELFEDQVLIHPEKNALIFGTDSLSYQSLNEQSNQLAHYLIQQGIKPDTLVALCVPRSLQAVVALLGILKAGGAYVPLDPGYPKARLQYMLEHSEVEFILTETQEVEKLPITQQKVICLDTDTIQLQLQQMPGVNITENERPYPLTENNLAYVIYTSGSTGKPKGVMLEHKGWVNLALSQDVLFDVNSNIHVLQFASWSFDAMILEMSMTLAYGSTLYLISETQRRSPELMDELVEKHQITHAVLPSALLPHLNFDKWHSVSTLLLAGEAVLPQIAVQWSQNRQLFNVYGPTECTSIVTTALLTDERITIGKPLPNVVMRILDPEGNLVPMGVIGELHIGGVQLARGYRNSPEITEKQFIRDPFSSHSTNEQENRLYRTGDLVRWTHDGQLEFIGRIDSQVKIRSHRIELGEIESVLSKHNALSSAAVIAYGQDEDKKLIAYVCPSTEWLGEKAIEFNAHSVNNWTEIFDEQYRQPIMESTQKEDISEVVTAESDFGGWMNSYTEQPIAVEQMEEWLADIMKRIDSLNPHRLLEIGCGSGLLLYRYAKQCESVVATDISAEVLNRHQHILQQRGWSHVELRRGDALNSGTLHAGEFDSVVINSVVQYFPNVQYLEKMLEQIIPALTSGGKILLGDIRNLDLLTAHATAIEQSRLNGQRIQVGSLANRIQRRLQQEPEFLLSPTYFAQLPERYPEISRVDILVKRGVGDNEMMRYRYDVILHKRDENTGSLCERSINWHNFDSLENLKNRLQAGTEETFGISGIPNARVKDEFVLAEGLRHWPANQVITPPENASGFSPQALKQIQELESLLQYAEQCGYQCGVTWSQQQPDLLDIIFSRGELPPVLARTDYNQVHLANYPQISAINGELSELLESTLKQQLPEYMVPSLYIPLERMPLSLNNKVDKKALPVPNEDDLRRQTYVAPRSEMEIKISQLWRKLLNVNQVGIYDNFFTLGGHSLQATRFISSIRNDLGIEVPLRSVFEHPTLEQLSQIITIHLLKEKRKHFQAEQDSSQEYLRGEI

SEQ ID NO: 4586 - protein, 378 aa, Xenorhabdus sp.
KPPLWLAIALMMFPQIVETIYSPALTNISRGFSASVEQASQTLSLYFFAFAIGIVVWGRLCDVIGRRPTIIAGLLLYSSACLLALLTAHFWLLLIARMLSAFGAAVGSIGTQTMMRDSYRGEELAGVFSIMGIALAASPAIGMISGSTLNHFGNYQAVFAGLAILAVILTVWSMARLPETRPTTITKVVLSETARMMLKDISIWRSAFLIALFNICLFSYYQLAPFRFDQLGISPTLFGYTGLILAFGVMLGSVLNKLLLKKKWETEKLTFLAASLTLFSGIFVYLLENSWLFIFPMLGIVIAYGVAIPNLLASALTYYTDRLGTAGALLGLFYYMLLAGGLTIAGWSQALGNTLAYCGLATVLLSLPGIIPSRESKF

SEQ ID NO: 4587 - protein, 182 aa, Xenorhabdus sp.
ASEKINIKASPEISDKKHRDIPLSIYLLGLTIFILNTSAFMVVGMMPSLMDAFAVTVTDIGYLLSLYGVGMLIGGPILTTVFGVLRIPNKQALLWILTLYSIGGIIAAIAGSYYVMAIARVITGFAGSACIGIALAICGEVVKTEIRGRASSIIFTGMMLANVLGVPAAIMIDQYFRAHGRA

SEQ ID NO: 4588 - protein, 1397 aa, Xenorhabdus sp.
MIERLHSMGLTLAASNLFQCPVLSELAQTLEKHQTVVIPPNAITPTTTMLTPAMLPLIDLSQSEIDLIAGQVPGGIANIQDIYALSPLQDGILFHHLLAKEGDPYLLAYPMIFADRALLDRYLAAVQKVVDRHDILRTAFIWQGLSTPAQVVWRHGSLSVTELTLSPAGGPVSEQLAHRFDPRRYRFELNQAPLLRFVVSQEIDGRWHVLQLQHHLIGDHTTMEVMHREVQVCLAGQDDNLPVPVPFRNLVAQARLNSNQAEHTRFFTDMLADVDEPTLPFGLTEIHRDGSQVTQSHRMLAPELNNRLRQQAKRLGVSVATLCHLAWAQVLARTSGQSKVVFGTVLFGRMAAGEGADNGMGLFINTLPLRLDIDDTSVHNSIRLAQSRLAKLLDYEHASLAHAQRCSGVAGGTPLFSALLNYRHNEQPIIPHEVLPGIEFLGEQERTNYPLVLSVEDGGSTLGLTAQVVQPFEPDRICGYMQQALESLAEALERAPETSVRALNILPETERTLLLEDWNATETAYPEQLCIHQLFEQQVEKTPDATALVHEGQTLSYAELNAHANRLAHQLIALGMTPEQRVAICMASSLTRVVSLLAVLKAGGAYVPLDPAYPGERLTHILNDVAPSIVLADATGRIALGEEALIGLTLLEPNILSGALPAQPDNNPQKLALTSRHLAYVIYTSGSTGMPKGVMVEHRGFVNLIQDKISQFGIHSHSRMLQFASFGFDASVWEIMMALCGGATLDIPADAVRQDPHLFWRYLEEQSITHACLTPALLQDGADLPEINIRPTLILGGEAPNPVLIQTLRNRATVFNAYGPTEITVCATVWRCPSDYQNGFIPIGRPTANTQIYLLDNDGQPVPLGVVGEIYIGGDGVTRGYLNRPDLTAERFLVDPFNQAPDARMYRTGDLARYLPDGNLVFVGRNDQQVKIRGFRIEPGEIEARLTEYPTVREAIVLALGEGQNKRLVAYVVAGKDSGLVNSLREYLNASLPDYMVPAAFVCLDAFPLTPNGKLDRRSLPEPDQNAFAHQTYEAPQGEVEITLAAIWRELLGVKKIGRHDNFFALGGHSLLAMRMINLAADRGLICTLNNLFQFPVLAELVSKMTLDPLSQPQSSAIPVRSSGMEPPLFFVPSGMNDYSYVFGLSQYIHPDYPVYVLPWPSVNEEQVSTIEALADKMITFMKSVQPEGRYRIYGYSSGGVLAYAIAQQLLNAGETVDFLGLIDTPAPHCFKQQIIQPKLQFLAELAKQSGGEHEEKIATLHQKIDQLGLVQFIAAAQKLELYPANLRPDLIARRWEQMGNYVQMIKAYEPEVLEIMLHQFYATEPYPQIPFVTETLLPSLSMEPSLGWEQVVPDTLLQLTPVPGDHFSLMEDSTNKVILAKTLSRALEMNCEAEAV

SEQ ID NO: 4589 - protein, 394 aa, Xenorhabdus sp.
RNALFIVSARFISDFGAFLNMVALSTYVYLLSNSVMHVSIFLACRVAGGVIASLIGTPFFRRYARRWPLVCFDLLRVLLLCLLLIIPVAQQLLILPAIAFGIGLGNSMFAIGLNSQLPHWVSASQRISTNSWLTSVAATGAVLGSLISGLLVAGSGYEMVFIVNIITYLVAAILIMPLRFLTKPESQGTRALGNEWRELRLGLRGAPILAGMLFLSLADTLGSAAHNVGFPIISKLLNPDNASTVMGLLLATWAVGKFSGARLASYLLRSRNLLKMEKLFFLGVALMSTGFILTFQQTDPLWLLVFAVWAGIGDGIAEVSLISRAQSEPESLRLPIFSLLTLLQMTGFGVGMLLVAPFYVWLPPSSVIIIFHGLPLAVLVMILIWAWRFTVSKV

SEQ ID NO: 4590 - protein, 475 aa, Xenorhabdus sp.
VISTEFEQIAARFPENIAVTQGNESLTYRMLSEHVTRLSQPLHDQAGSQFVMTLMEESISLITAALAIMKAGKVFVPLSPKLPEQRLATLLAQFRGATIVTCRQWLPLLEHLSEGYSLVLADEVLADDIQEQHSIIPPVRVAENALPTRIHNSDTQHHRLAYVYFTSGSTGQPKAILGREDSLLHFIHWESRELGVTLADKVSQLINQMFDPFLRDMLLPLLNGATLCIPTVHDIRYSPQELLGWMREQQISITHLIPSLFQVLLECPQSSHDLQSLRYAVLSGEMLKGSLVDLFYQCRLPQAQLINLYGTTETTLARVCYRVTEKDRQRSLIPAGKPIDDTVITVVNERGESVPAGMEGEIWISTPYMSAGYLSSGAENHARFITPENGELAGQPVYRTGDLGRIDEQGNLLLLGRNDFQIKINGQRLETAEIESLLEQHPAVQQAIVQAFEQPQGIRLVAFVRPVPEITVTAL

SEQ ID NO: 4591 - protein, 2616 aa, Xenorhabdus sp.
KTPNNPSTGQPKGVMVEHHSLCNLVTTQQNVLALTPVSRVLQFASGSFDASVWECAMALLTGASLYLAKRADLLPGAILSDYLETHAISHVLLSPTALTAMDSLPDTLQTLLVGGEACPAGLVKRWSAGRQMLNAYGPTEITVCATLYPCDSQENTPPPIGRPITNTQVYILDANAQPVPVGVTGEIYIAGAGVARGYLNRPELTAERFLLDLFSSEPNARMYKTGDLGRWRSDGNIEYLGRNDSQVKLRGFRIELGEIEARLVQCHGVREAVVLIREDEHNQKRLVAYLKPEEGTELVPTELRQQLAQHLADYMLPSAFIILDTFPLTPNGKLDRQALPAPDLSALAIQGYKAPVGEIEITLAQIWQQLLGLEQVSRYDNFFALGGHSLLIVSLIAELHNHGWRLDVRNVFATPMLTDMAQAAQRDAEFFVVPPNLIPNGCQAITPDMLPLVSLSQSEIDAITASVSDRAGNVQDIYALAPLQEGILFHHLLQTQGDDYLLHTLIAFDTRTHLDNFLSVMQQVIDRHDILRTSVYWQDLAQPVQVVWRQAPLCIKEFTPETEDDISAQLRTHTDPRWHRIDLTRAPLFTADIAHDTAQNEWLLALRFHHLVSDHMTLDLIFAEIVRIRQGNADALPVSVPYRNFIAQTLNVPVSVHEDYFREQLADIDEPTAPFNVLKMPKISALPDHRQLRDSSNPVAKARILLDNDLANTIRSQARRLGVTPGVLFHVAWAQVLAHTSGRDDVVFGSVLLGRLQGITGAEQMLGMFVNTLPIRISLAGRRVQETVLDTYHRLTALLEHEQAPLALAQQCSGVAQPMPLFGALLNYRHSQMTQAEMDTIWAGMRVVAAEERTNYPITLSVDDLGDGFQLTALTVTEISPDQVTSYLITAIQGLVEALIDHPQQPILNIPILSGSERQRLLVEFNAPETQSAFPENALIHQLVEIQALQRPDAIAVTYENQTLSYRELNQRANRLAHHLLTLGIRPDDRVAICIERCPEMVIGLLAILKAGGAYLPLDPNYPAERLNFMLEDASPVALLTQAQWHEKLNSALPVILLDDKSDSFASFPTRNPDIQTSGLTSHHLAYVIYTSGSTGQPKGVMVEHWNVISLLINNGFADIGPDDCIAHCSNVSFDAATWEVWAALTHGARLLLIPEKVLLQPDQFAQSLSAEKVSALFLTTALFNQYVSLIASTLSGLRYLLFGGEQANAHTAIRFRAEYPVQHLLHAYGPTEATTIATVYEIPLMPEKTGEGEIKIPIGRPIGNRRIYILDKQAQPVPVGVSGEIYIAGAGIARGYLNRPELNAERFLPDPFSSEPDARMYKSGDLGRWLPDGNIEYLGRNDFQVKLRGFRIELGEIEARLIQCDGVREAVVLIREDEPNQKRMVAYLRPEEDAELEPAELRRQLAQHLADYMLPGAFIMLETFPLTPNGKLDRQALPAPDSSAVATRDYAAPVGETEITLARIWQDLLGLEQVGRYDHFFELGGHSLLAIQLTARVRQVLKRELPLQQLFDQPRLMDLAQVLTDVAATSQMTIPVTDRSQPLPLSFAQQRLWFLDRLDPAASLAYHIPLVLRLSGELSHQALRQTFDNLVARHEILRTRFVLVAGQPRQQIATADSRFALSYQDLRTLTADEQTQRMTEIATTETGIPFDFTQGSLIRGQLLQLADDEHVLLITQHHIISDGWSVGVLIRELSILYRAALENQENPLLPLPIQYADYAVWQRDNLHEAALNRQREFWCHQLRDAPALLTLPTDRPRPASQTFTGGRVPVHFNAELLASLKTLGQRHNNTLFMTLLTAWSIVLARLSGQDDIVIGTPVANRQHRELEELIGFFVNTLALRVRLNGSARVADLFRQIREQTLAAYANQDLPFEQVVEALQPERSLSYSPIFQVMLALNNTPAQTLTLPDLQLTVMEPIHHSAHFDLTLSLTETDAGLTGELTYASALFDAATIERMVGYLTNVLNAMVADESQLVATVPMLSQSEQQQLLMDFNAHQADFPDNALLHQLFEAQAEQSPDTVAVVFEGQTLSYGELNQRANYLAHQLITQGVCQDDRVAICVERSLEMVVGLLAILKAGGAYIPLDPAYPAERLAYMLEDSNPVVIVTQATLAEKLTSPLPVVILDNVMLDNLLSGDLLPDHAQFENPDVQKSALNPHHLAYVIYTSGSTGKPKGVMVEHANVTRLLAATQARFQFDNNDVWTLFHSFAFDFSVWELWGALAYGGKLVVIPTECARSPQMFYELLCRKQVTILNQTPSAFRQLIAAQEMMPHEQHTLRCIIFGGEALELHTLAPWVERNPTKQTRLVNMYGITEITVHATYRELTEADIHARRGSLIGQPLDDLRIYILDAYGQPVPLGVAGELYIAGAGIARGYLNRPELTAERFLSDPFSDKPDTRMYKTGDLGRWLPDGNIEYLGRNDFQVKIRGFRIELGEIEARLEQCAGVREAVVIAREDGTHQKQLVAYLLPQPDARLNPTELRQQLAQHLADYMLPSAFVTLDAFPLTANGKLDQRALPAPDSSAVVSHRYVSPMGETEIALAQIWQRLLKLERVGRHDHFFELGGHSLMIVSLIEELRLIGWQLDVRSVFISPVLADMAQTIQRDTDDTFIVPPNGHS

SEQ ID NO: 4592 - protein, 2472 aa, Xenorhabdus sp.
MVNGQPQVELLPAELTLPVKQYDLRNLPDVDKQLNILCAQEAETPFDLARGPLIRCALIQRADEDYVFLLTQHHIVSDGWSLEILKSELSALYSACLNKQPDPLPPLVIQYPDYAAWQRKVFSDEKMRTHSDYWRRTLADAPVLLELPTDRPRPSRQSFSGGRIPVQIDATLVQELKQLGQHHDSTLFMVLLTAWAALLSRLSGQDDLVIGIPSANRNRRDIEPLIGFFVNTLALRIDLSGTDSFGTLDMETLLRRVRQTTLSAQEHQDLPFEQVVEIVQPPRRPEHTPLFQVMFAWQENDTQEWQLPGLAVTPVVQGYDIAKFDLQLELTEKAGEVVGELNYSSALFDPETIERQVGYLQTLLRAMVSHPQQSITTVDILSPAERTLLLETWNAPVAPYPEQLCIHQLVEQQVEQTPDAIAVRYENQTVSYAELNARSNRLAHQLIALGVIPDQPVAICVTRSPERIVSLLAVLKAGGAYVPLDPAYPGERLAYLLTDAAPTILLADDIGRSALGEETLKTLTVLDPNIQPNQPDSNPSVPELTSKHLAYVIYTSGSTGKPKGVMIEHQGVVNLTLEQSARLNISETSRVLQFASFGFDASVWEIMMALSSGAMLVIPTETIRQDAHRLWHYLEEQSVTHACLTPAMFHDGAGLPEIAIKPTLIFAGETPASALFKALYGRANLFNAYGPTEITVGATIWNCPSDYAGRLIPIGKPTVNKRIYLLDKYGQPVPQGAVGELYISGVGVARGYLNRPDLTAERFLPDPFSDDANARMYRSGDLVRYLPDGNLVFVGRNDQQVKIRGFRIEPGEIEAHLTEHPAVSEALVLALGDGQDKRLVAYIVANRTDNELATSLRKYLSAISPDYMVPAAFVRLDAFPLTPNGKLDRQALPAPDQHAFARQVYEAPQGEAECALATIWSELLEVEQISRHDSFFALGGHSLLAVRMIERLRNRGLGLSIQTLFESPTLCILAQSLAQHSEITIPENSITPDTMTLTPEMLPLIDLTQSEIDCIAEQVPGGVANIQDIYALSPLQDGILFHHLLAKEGDPYLLITQQAFADRSLLNRYLSAVQQVVDRHDILRTAFIWEGLSVPAQVVCRQAPLFITELTLDPADGPISNQLAQRFDPRQHRIELNKAPLLRFVIAQNTDGRWILLQLLHHLIGDHTTLEVMNSEVQAYLAGRGDSLPASTPFRHLVAQARLGTSQQEHTRFFTDMLKAVDEPTLPFGWAEVHHDGSKVAESHRTLTSALNRRLRHQARRLGVSVAALCHLAWAQVLSRTSGQKQVVFGTVLFGRMAAGEGADNGMGLFINTLPLRLDMDETPVLESVQVAHTRLAGLLAHEHASLALAQRCSGVASGTPLFNALLNYRHNTQPVMLDETTSGIEFLDAQERTNYPFVLSVEDGSSDLGLTAQVVQPFDPERLCDYMQQALESLTEALEQTPEMPVQMLEILPESERTLLLQTWNATEAAYPDQLCVHQLFEQQVESAPEAIALVYEDQSVSYAELNVRANRLAHQLIELGVVPDQRVAICMASSPARIVGLLAVLKAGGAYVPLDPAYPGERLNHILCDAEPAILLADNTGRSALSGQAQDEQSAQMIAQLIVLDPNSLPEQPDNNPQIAGLSSNHLAYVIYTSGSTGKPKGVMVEHRGFVNLIRDKISQFGIHSHSRMLQFASFGFDASTWEIMMALGSGASLVIPDNTVRQDPRRLWYYLEEQAVTHACLTPALLQDGVDLPALKIKPTIILGGEAPNPLLIRTLSRQAAVFNAYGPTEITICATAWHCPPDYQGELTPIGRPTANTRLYLLDTCHQPVPLGAVGELYIGGDGVTRGYLNRPELTAEYFITDPFSNKPNARMYRTGDLVRYLPDGNLVFVGRNDQQIKIRGFRIEPGEIEARLTEHSAVREALVLALGHEQDKRLVAYVVAEANDGLVSLLREHLSTLLPDYMVPSAFVRLDAFPLTPNGKLDRRALPMPGEDAFARQVYAEPQGETEIALAAIWHDLLGVEQISRYDSFFALGGHSLLAVRMVERLRSLGLTLAVRDLFQSPVLSELAQTLTQNQGEGVPANVITPETTKLTPEMLPLIDLTQPEIDHIIEQIPGGIANIQDIYALSPLQDGILFHHLLANEGDPYLLAGQMAFANRTLLDRYLSAVQQVINRHDILRTAFIWEGLSVPAQVVCRHARLSVTELTLDSVNGPVSKQLAQRFDPRHYRLDLGQAPLLRFVVAQETDGRWIALQLMHHLIGDHTALDVMSHEVQAYIDGQENNLPVPPPFRNLVAQARLGVSQEQHVRFFTDMLAEVNEPTLPFGLAEVHHDGSQITEFHRMLTAELNNRLRNQARQRGVSLAALCHLAWAQVLARTSGQEKVVFGTVLFGRMAAGEGADNGMGLFINTLPLRLDMDETPVQDSVQMAHRWLAGLLTHEHASLALAQRCSGVQGGTPLFSTLLNYRHNALPVTSNEIHGAVLNSLEHRI

SEQ ID NO: 4593 - protein, 376 aa, Xenorhabdus sp.
MLMPLAIDMYLPSMPTIASDFGVSDGKVQMTLNSYILGFAIGQIVYGPMSDSLGRKPVILGGVTVFAISSAACALAQNIDTFISMRFLHGFAAAAASVVINALMRDIFTKDEFSRSMSFVTLVMIIAPLLAPMLGGIMMVWFNWHAIFWSIAIAAVIAALLVAVFIRETLPKERRLRFNLKVTLGQFVMLFRQRQVLCYILASGFSFAGMFSFLRAGSFVYIQLNGVPVQHFGYYFGLNIIFMFVMTTINSQFVRKYGALNMLKFGVFVQFLMGLWLLFSTMLDLGFISLVLGVAIYISCISLITSNSMAVVLDGYPHMAGTVASLSGTLRFSIAALVGAILSSAPEKSAWPMVGSMALCVILAMALIVYASKAIK

SEQ ID NO: 4594 - protein, 2481 aa, Xenorhabdus sp.
EQTLNQLRQAVLQKKLKERMQNSLTTEKAPISARDPQQEIPLSWAQQRLWFLAQLDPAALTAYHIPAALHLKGQLNIAALQGRAWTEFVARHEILRTTIGLAEDGGEGTARQIVHGKDFGFSLSMQDLRLLADDDRQNAIQNAIKSEASHPFDFENGPLIRGQLFRLAEDENILLLTQHHIISDGWSVNVMMQEFSTLYLSFCHEQPDPLPPLKIQYADYTLWQRKELQGKALEKQLDYWRNTLQDAPTLLTLPTDRPRPARQTYAGGEALVTLSPDLTGKLKAFAQRHGITLFMTLLTGWSILLSRLSGQHDLVIGTPVANRKYRDLEPLIGFFVNTLALRVQLQDNPTVSELLAHVKAHTVTAFENQDLPFEQLVEALKPPRSLSYSPVFQVMMSLDNTPGQQQFELPGLTISELDLSENSSHFDLSLSLHDTDEGLIGELEYASDLFDQATMDRMAGYLQTLLTVMVADDTQRVADLPLLTPNERNQLLAGFNARTASYPQEILLQQLFEQQVAHSPTSPALISEEQQLTYHELNQQANQLAHALIAAGVQPDDRVAICVERGADMIIGLFGILKAGAGYVPLDPEYPTERLAYILSDCKPKLLLTQEHLQNRLNTEVPVWIMDNDHYLDNVAQQSTDNPEPHQLGLKPHHLAYIIYTSGSTGQPKGVMIEHRQVVNFVYVQRETNELTPSDRVLQFTSVAFDTTVSDIFATLAAGATLVLRSASLRIPDKNFSQFLQEQAITVSDLPTAFWHLWVQEMAAGRCGFSPSLRLVIVGGEKAELRHFNTWQTLPETQSCRWINSYGPTETTVIATVWKPDNQESGLTNTVPIGSPLTNTQIYILDTQGQPVPIGVAGEIHIGGAGVARGYLNRPDLTDERFIADPFSQQANARMYKTGDLGRWLPDGTIEYLERNDFQVKIRGFRIELGEIEAQLAQCDGVKDVVVTAHEDESGNKRLVAYLIPQPETILDILQLREQLSAQLMEYMLPGAYVVLDAFPLTPNGKVDRKALPAPDHTAIISREYQAPEGEAEQQLASIWQELLGLEQVGRHDNFFELGGHSLLVVSLIEKLRQHSLAIDVSAVFASPTLAAMATNLTQQTESDTNNTPVPPNLIPDNCQAITPDMLPLVTLSQANIDQIASQVTGGVSNIQDIYPLGPLQQGILFHHLLETTGDTYLDNLLMTFDSRSRLDTFLQTVQQVIERHDILRTAVHWENLPEPVQVVHRHAPMPVTELELSPEINAEQQIQSYTDPDIVRMNINKAPLLSASIAREPNSDKWYLSLLHHHLVCDNLSLKLVFDEVNAMLQGQHEQLPTALPYRNFIAQTKNIPLEQHQSYFRQLLGDVEEPTLPFGLLDAKDSGDKVVENVLTLDSDLSRMVQQCARQQGVSTAVLFHVAWAQVLAQCSGRDDVVFGTVLMGRLQGGKETEKIMGMFINTLPIRVILQGRNVQQTVQETYRQLSTLLVHEQTPLVIAQRCSGIPASLPLFNSLLNFRHGSDETEEDEQELAAIWEGIETFNTKDSRSNYPLSLDVDAYDDQFELTIQCSQQIDPSRINAYVATALKGLVTSLLQNAPAQNIQAISVLPPAEKTQLLVDFNGAEIAYPQNILLHQLFEQQVSFTPDSIALVSGDEQLSYAELNQRANQLAHALIAAGVQPDDRVAICVERSPDMIIGLFGILKAGAGYVPLDTDYPTERLAYILSDCKPKLLLTQKHLQNRLATEVPVWLMDSEAHRSNVAQQPTHNPEHLQSGLAPHHLAYIIYTSGSTGQPKGVMIEHRNVVNFVHVQRQTNELTPSDRVLQFTSVAFDTTVSDIFATLATGATLILRPADLRVPDSNFGRFLREQKITVTDLPTAFWHQWVQELVSGRCDFSPSLRLVIVGGEKAELHHLTLWKSLAETQHCRWINSYGPTETTVIATVLKVDGHSLYTEPTLPIGYPLTNTRLYILDRQGQPAPLGVSGEIHIGGASVARGYLNQPELTAERFIPDPFSHQTDARMYKTGDLGCWLPDGTIEYLGRNDFQVKIRGFRIELGEIEARLFAYPGIKDAIVIVREDTPGDKRLVAYLVPQPGTTLDLEDLRHSLHVNLASYMIPSAFVILDTFPLTPNGKLDRRALPAPDKSSVISRNYEAPVGETEELIAAIWQDVLRLEQIGRHDHFLELGGHSLLTLQVATRLNQALAKDISIRDLLVYSTISELATYIQSDAPLPQQQNIVTVRQGNGNTSLFLIHAVNGDVHYAYDLEPYMDNDELSIYGVIASDTLAEEGIQPTINNMAQEYIKCIRQIQAHGPYHLAGWSSGGTIAYEMSRQLIADGETVNFIGLLDSASNYLDFYSAEEKQSGMMFEKSATLLELLPYDIPEDINDEFNKLANERDYDAMLILAEKLNLLPPKVTRENVSDLVQMRYNISVAANCYIPQAINTNVTLFRAMDEVAEGETMALKWDQILPSEQLTIIPIKGDHDSMMLQPNIQDTGKALLQAVMNNQ

SEQ ID NO: 4595 - protein, 142 aa, Xenorhabdus sp.
MTIERTFSIIKPNAVKKDVIGSIYARFESAGFKIIAAKMLHLTREQAEGFYAEHKGRPFFDGLVEFMTSGPIMVQVLEGENAVQRHRDLMGATNPDNALAGTLRADYADSFTENAVHGSDSIESANREIAYFFSDDEVFSRS

SEQ ID NO: 4596 - protein, 899 aa, Xenorhabdus sp.
MMVQAVQSVIEAIPDLNVRYELNDDGELYKTPATSWQSCLEFFHAGSHSDMLKKILTVQASAWIPEQNSPFNILIIQRNDKVILALILHEILAQTCHETEIIEMLIRAYAGHLVKLPPLKRVSLLPYDGKATSAVSLLCCRNHENASIHSSFGEETDLNKDRLALRWKTGLKINELEEFLPRDKLPHCVSALISARFARFIALLGGQKKLALCLLQPDGFRRLIIEPDMAETQIISSIMDKLQAQPDEDNFFSGAPVTEDDEPEVYVRLLSRPNDLVEQQRLLSQSILLPTYEMRPDFELAMEYESTEEISLILTTGQSVSSHAGEFLMSRFVSFLKGTEDAMMSLATKSVSDSDIPSTHDATSKEISADTDEIATIILSEFREALAITDMTLEDDFFDCGGHSLLATRIIGKLLGTHGLEVHFGDFFSHPSATALASRAIRKNQHTGSISSAQNDHLTAPLALAQTSLWDAYKAYEFGTIFNLPFALDFLDEVDETILEQVFSDLIERHSSLRTLFYVQNGKVYQQIVTMSDMSDYKWFWFSHENQGVHLDDEAAYTFDLSRELPIRIRLLRNPETGRQILSLLVHHMVIDEWSLNVLMDELSQAYLSRSSGVAPIWKKPVLSFHQFALQQQANGFNQKHLDYWTNMLRDATRGLELTLSDNQKTVAAHESSSKAGWIEYKPKPETTHHLYSFARKNNASLFSIVYAAIALSLHKLGNLKDIVIGTSASGRTEHDTYETVGYFTTMVAHRLQFYPEKPVGTLIEDTRDTINNSMPYADVPLDLIQQSLGMSPEEGLIFDVYIQIHANNALNGVLKTSLGNDIRYRQIDPDKKESMFGLQFEIMEDVIDGERIMRLVITYRKERYPEELVQRLCETIEKVFSFFTTPGALSLPLAQVTV

SEQ ID NO: 4597 - protein, 1724 aa, Xenorhabdus sp.
  unsure (1)..(1724): unsure at all Xaa locations
MRFWSYKMHTQRNHKPSCGEFSLSSTQQVIWLDQMTRPNSSDYNLSVLICLEGELDESLFIQALEAVVSHHDALRLKLIETYGMPRQTFVETLPLPLTVYDFSQETDAEFRAEQQMHANFIRPFCLYNELWHTGLFRVGENRWYWQFCCHHLILDGMGLKLLFKELLEHYRHLTTGENLPDIAPSYLDFITEDQAYLNSKLYMRDLQFWQNRYETLSSALLPLSHSRKPATSEFAKPVFWQLDKTLSQQIENIAAAHGLSVLHFMYAILACYFTRINDTEEIVIGIPVHNRKNKKQKSTLGMFSSMIPVRVIIHADDSVLDIMHKVATELHHCYKHQRFPITEINQHTQIKQKTGRSQLFDIALSFEPFNVCVSMENIAMTLKGSYRGVMFPLSIAIHQYSISTPHQIEKENKPFTIEFSYDSNYLSYEEVITLQSRLALLTEAAVISPETKVKHAPLLPETERHNLLFTFNNTEAEFPQDALIHELFEQQAALTPEATAVVFEEQSLSYNELNRRANRLAHYLIALGVQPDDRVALCVERSPEIIVGLLGILKAGAAYVPLDPRYPTDRLRYMLHEAAPVALFTQSELVARLDNNLPAVLLDTPASSAFDNMPDTNPDCRTRGLNSHHLAYVIYTSGSTGNPKGIMVTHCNVINLYTGLQLVINLTTPCRTALNASIVFDASVQSWLQLLAGHTLVIIPEAIRANGTQLWRYLAHHEVDLFDCTPVQLQWLLNAGLGTDVGYQPQQVLIGGEAISPVVWSRLQQIETPRFINVYGPTECTVDATFCSVDHSLPYPNIGHPIANTRIYILDAYGQPVPLSVTGEIYIGGAGVARGYLNQPELTAERFVVDPFSSQPNTRMYKTGDLGRWLPDGNIEYLGRNDFQIKLRGFRIEPGEIEAHLMQCPGVQDAIVIVREDMEGDARLVAYLCAETGTELLPVDLRRQLAHHLAEYMLPCAFVILDTFPLTPNGKLDRKELPAPDLSAVITHDYAAPIGDVETALVEIWQDLLGVDRVGRHDHFFKLGGHSLIAVNLIEQLRNRGYSLDVSAVFATPLLTEMAQAIQTGMDVPLVPVLVPPNRIPEGCTVITPEMLPLVTLSQSEIDTVIATVTGGVANVQDTYPLSPLQEGILFHYQLQENDDTYLLNTLLAFDTQARLEAFLAALQQVIDRHDILRTAFCWQGLSQPVQVVWRQAPLLVTSFIPTSVQNIPSQLQAHIAQRMNISQAPLFTASTVHDPASNEWLLGLSFHHLVSDHVTLELIMDEIQQLLQGEVESLPAPLPYRNFIAQMLNIPPSVHEGYFRERLAEIDEPTAPFGLLNVQGDGTDVTEAQLCLDITLAQTLRALARQLGISPSVLFHVAWAQVLAHTSGRDDVVFGTVLSGRLQGTTGADQVMGMFINTLPVRISLNNHTVLEVVQATAKDLADLLEHEQFPLALAQRCSGVIPPQPLFSALLNYRHSPSNSTDKLGWEGVRLLSSKEWSNYPLDLSVDDFGDGFTLVVQAVNSVDPRRVVNYLYTALCGLTDALQNNPRQPVWALSILPVAERQQLLEVFNATQADFPQHALIHELFEQQVALTPEALAVVGEEHTLSYDKLNQRANQLAHALIAAGIRPDDRVALCVERCPDMMIGILGILKAGAAYVPLDPNHPDKRRAYILSDSTPKLLLTQQHLQPQAQNPDIPVWLLDEADYLERVAQYAVANPEPEQLGLQNHXLAYVHLKSTLVRR

SEQ ID NO: 4598 - protein, 3341 aa, Xenorhabdus sp.
ITSAIRDNHQPISNTYPLSSPQQAIWFDQALRPHSYDYHINMFICVEGELNEEIFARAFEQVVYSNDSLNLRFISTHGLPEQQVVRPQSITMDILDFSSYPDAEIRVKEHINAQLIRPFKLDDVLWRSSLLRISNTCRYWQFCCHHLIIDGASMFIFSEKLLDTYNRLVQGEMPDKVAFSYLDFVRDELNYFSSEHYSHDMQFWLQRYEKLPPPLLKPAHTSHPSDKPSTPVAAQPVIWSLEQDLFKRLEKAIGGRRLPLLYFMYAVLACYFARTTDINEIVIGIPLHNRKNSKQRQTVGMIAAVFPIGITVEPEDTFHDLMDKVAAEMQHCHKHQRFPTVELNRQLHSRQKAENTKLFHITLSLESIEVNFGIEGQDTRIKLFDMQSGIPYPLTVKIKQYTNKAISNTTPPPISIELHASPDYLSHQDLITLRSRLAVLLNAAITTLETPSLTSTKIVNLPILPDIERQQVLVDFNATQVKFQQDALIHQLFEAQVQRTPNAIALVFENQSLTYAELNKRANRLAHHLIALGIRPDDRVAICIERSLEMMVGLLGILKAGGAFVPLDPAYPSNRLIYMFNDAEPVALVTQSAITEKWNKNLPTILLDNPPYSVLDESSAENPNIQALGLTSRHLAYVIYTSGSTGQPKGVMVEHRSLCNLITTQQNKLNITPESRVLQFSSNSFDSCIWEFCMALIAGAHLYLARREDLLPGKILSHYLETHAITLALLCPSVLATVDSLPATLQTLLVGGEACPPTLVKRWAKGRRMINAYGPTETTICATFGQCDSQEDKAPPIGYPIANTQIYILDKYHQPVPLNITGEIYIAGACVARGYLNRPELTAERFLTDPFSADNGARMYKTSDLGRWLPDGRIEYLGRNDFQIKLRGLRIELGEIEARLHQCEGVHEAVVLPYDNPSCEEFTDQNAPDEYRSVSKHLVAYLLSEANARLEPMALRQQLSQHLAEYMIPSAFVTLDAFPLTTSGKLDRQALPKPDHTSIVTRSYQAPVGELETVLSQLWQKLLGMKYISRYDHFFELGGHSLLAVSLIEQLGNMGWVISIQTVFANPVLNEMAQAILSAQQDATQKNMKQENMPAFTVPANLIPDGCTALTPDMLTLVSLSQHEIDAITAAIPGGAANIQDIYPLTPLQEGILFHYLLQQQGDTYLLRNLLAFDSRERLDNFLSALQQVINRHDILHTSVFWQGLEQPVQVVWRQALLSIKTFSPDRHLANSEANIPEQLLAHTDPHQYRLNISQAPLFSADIVYDPLRNEWLLALCIHHLACDHVTLESITSEISALLGSHTQKLSPALPYRNFVAQALNVPASAHEDYFREALSDVEEPTVSFGILDVHSGNKEIAEARQPIDAKLAKAIRTQAKRQGISPSILFHTALAMVLAKVSGRDDVVFGTVLLGRMQGSAGINQAMGLLINTLPIRVKLADNSVQATIQETSLSLIRLLEHEQTTLTQAQNCSGVAPSLPLFNTLLNYRHSQSNLTFNQWEGIRLLMQEERINYPFGLFVDDWGDGFSLVAQSVSDIEPVRLINYITTALTGLVNALETAPHQPILNISILPDRERQQLLVDFNTTQSYKETQPYPNLVFPLHTAAISRPTFIQQSIEKQAQYMPDAIAVIFEEQSLSYAELNRQANRVAHYLLTLGVRPDNRVAICIERSLEMIVGLLAILKAGGAYVPLDPHQPTERLAYMLEDSAPVALLTQTSFVNLAHRLTDSIPIVNLSNGECLLADMPDNNPDPDTLGLTSHHLAYVIYTSGSTGVPKGVMNEHCAVINSLFWAQKTYQLTPQDRILQKTPFSFDVSVWELFPPLMFGARLILARPEGHKDPHYLLSETEKHKITFIHFVPSMLQLFLSAIPAGRCLSLRHILCSGEAFPYALQQKCLAYFAHCQLHNLYGPTEAAIHVTAWRCVADRYVGRIPIGKPIDNIRIYLLDNQKNPVPVGVSGELYIGGVAVARGYLNRPELTDKHFISDPFSPDPDARLYKSGDLARWLPDGNIEYLGRNDFQVKIRGFRIELGEIEAKLTQCHGVREAAVIAREDDSHEKAANCETAVGDKQLIAYLLAEPDTNLDPAKLREQLAQHLAEYMLPSAFVILDTFPLTSSGKLNRKALPVPDQAARVTRHYQAPIGATETELAEICQELLKLEQIGRYDNFFELGGHSLLAIQFATRIRQKLARELPLQDIFSHPVLADLAVLIANTSVTTQTTITAAERDQLLPLSFSQQRLWFLTRLNSEISLAYQIPTVLHLSGHLDHAAFATALDHLVSRHESLRTRFVLVDEQPYQHIDNADTGFSLTHHDLRSLDETARMSRINELVKIERQTPFDFASESMIRGQLLQLSDKEHVLILIQHHIITDGWSLGILLRELSALYSTALGENETSLPPLSIQYADYAVWQQKWLQSEDFAVQKEFWQNQLQGAPALLALPTDYPRPPEQNYTGDHVPVHLSADLLSALKALGQRQNTTLFMTLLTAWGIVLTRLSGQNDIVIGTPVANRSHSELEGLIGFFVNTLPLRIETEQCHSVADLLTHVRERSLAAYAHQELPFEQLVEILHPERSLSHNPIFQVMLALNNTTIPSLELPGLSVSLMEQPHSTAYFDLTLALSETQDGLSGYLEYASSLFDRATVQRIVGYLTNVLTAMTLDETQAISFLPMLSVGERQQLLTDFNDIPPVQSNNPAQNPVTGFSQNMLIHQLFEEQVQRTPDATAVIFEEQSLSYGELNRLANQLAHSLIAFGVRPDDRVAIHVERGLDMIVGLLGILKAGAGYVPLDPEYPVERLTYQLTDSKPVILLTQKHLQTRLPIQNIPIWLLDDETHRDSMQKQSANNPDHQQTGIQPHHLAYIIYTSGSTGKPKGVMLEHRNVVSLIGAHCQISEPGPGDRVLQFVTFAFDISVSDIFPTLASGATLVLRPSYLKVPDSTFVDFIREQKVTIVNVPTAFWHHWGQEIKAGRSGFSSCIHTLIVGGDKVEPRCLIDWLSCPETANCRWFNAYGPTEITITATAIMVNREMMMGSNNHISPIIHSIPIGRPLSNTSIYILDTFGQQVPIGVSGEIHIGGMGVARGYLNQPELTAEKFVVDPFSKQPNARMYKTGDLARWHADGNIEYLGRNDFQVKIRGFRIELGEIETRLLQCQGIREAIVLAREEDSYSKTGHDKRLVAYLIAEPDAKPEPAELRRQLAQYLADYMLPSAFVMLDAFPLAPNGKLDRQALPVPDLTSVVTRTYIEPQGEAETVLAEIWQALLRLEKIGRYDHFFELGGHSLMIINLVERLRSRGWRLNIREVFVTPILAEMAKTMQVTEDNPATFAIPPNLIPDNCSAITPDILPLVSLAQDE

SEQ ID NO: 4599 - protein, 117 aa, Xenorhabdus sp.
IYWIFLALAIVTEVIGTLSMKQASISGDFTGMFVMYFMITTSYILLAIAVKKVALGVAYALWEGIGILFITAFSVLWFDESLSPMKVGGLSLLIMGIALIKAGAKKAPKLQMKEKEA

SEQ ID NO: 4600 - protein, 109 aa, Xenorhabdus sp.
LAHFEWWHIAFLILAVCLEIVANILLKLSNGFERFWIGILSLVAVLGAFSALAQAVKGIELSIAYALWGAFGIIATVAAGWIMFNQRLNFKGWGGIVLLLIGMVMIKMA

SEQ ID NO: 4601 - protein, 501 aa, Xenorhabdus sp.
QTVADHCPVSVPIYDFSSHSDAETKARQYLDTRFMQPFHLNETLWHSELFKVSHTRRYWQFCCHHIIIDGIGAFILLEEVIDRYNRLMKGEPLNKVVPSYLDFITDDLAYLASPNYADDLQFWLERYENPPSPLLHPVKSNRTMQYGMQHSPTEPIFWSIDQTLFNRIKNIATEQKSSFLYIIHSALVCYFARTTDVNEIVIGMPIHNRKNTRQKHTIGLFASVFPIKVTISPEDTFRDIMNKTAAEVKSCYKHHRFPIAELNRHIHIQQKTEITQLFDITLSLEPFEANLHLEGEDTRVTCVNTQNRNPYPLSVRIKQFIDTAAPEDTFQSATIEFKYSGEYLTATEVTALRSRLAVLLDAALTSPDTPIINLPILPEEERQKVLVDFNATQADFPQSALIQTLFEQQVILAPEAIAVVGETQTFSYNELNQRANQLAHALIVLGVQPDDRVAVCIERSPAFIVCLLGILKAGGLMCPLIRLIRPNGWRIYWTMPFRSCY

SEQ ID NO: 4602 - protein, 1196 aa, Xenorhabdus sp.
VHLPMLPELEQQQLLVDFNTTQATFLPADNPQDALIHRLFEAQADQSPDAIAVVFEDQAISYRELNRRANHLAHYLIAEGVRPDDRVAVCLERSPEMVVSLLGILKAGGAYVPLDPAYPAERLKYMLKDSAPVTLLTQSEIYQAIYPDMLCDLESADALPIILLDIRAPFMETQPEHNPEVSGITDQHLAYVIYTSGSTGVPKGVMSSHRALSNRLLWFVHDVWFVNDIVTLPLITALKTSISFVDSITETLSTLLTGGRLVVFDKHEVKDPVRFRASLQHAGVNLLVIVPSLLKFLIQNNDEHALKSIRILICSGEQLAPELARQVVTNYPWIRLLNFYGSSEINGDATWYEYDVARTVPDVSVIGRPIANTRCYILNPDRQLIPVGVIGEIYIAGTGLARGYLNQPELTAERFLPDPFSAYPNERMYKTGDLGRWLPDGNIEYLGRNDFQVKLRGFRIEPGEIETRLAKCDGVREAVVIIRKNTIDEQTDGQERLVAYLLPHMGAKLVPAELRRQLAQHLAEYMLPSAFVTLEAFPLTPNGKLDRQALPAPDLSAMIVHNYAAPMGETEIALAQIWQDLLGLKRVGRYDHFFKLGGHSLLAIQLLNRMKEQEMEAPLTALFAHPTLCELAAAVDKHLAVPESPFDANPVPLSPSGSLPPLFLIHETSGDPLVYSPLATLLPAELPVYALQALGIHTLKQQPSSIEELAACHIQAIRRIQPQGPYRLAGWSIGGLIAYEIAQQLINDNEVVEFLGMIDTYNYVNDDTGNNTLHEDRASEDKTAVQIGLIIDSLRTQKNIDDEQALEALYKLSSLEQIIDYCIEHQWVPANITQNDILTRTHTAELITRLGQDYVPPKSPLPVHLYSADESNNRDRWHGWHDIAGHHSVLCPIGGTHFSIMQPPFLNQIADSITEQIQAVPAFDPRVIIQLGSKSVSPLFCMPGAGASPSSLLELALSFPSQLPIYALQARGFTAEHNYPHTSVEGAARAYIRTIREIQPHGPYHLLGHSFGGWIAFEIALQLQAEGEQVADLILVDTDEPNQQGSIHKPVSHTETIMELIDIYDMILDQPLPLTRQDFENLTQDEQHQLLHHALIKAGLFPAKTSISLLQGIIRVMQANLNTRYIPRARYEGLVHLISAEDENPDEIKNRETQWRTHVAKLDAMPVSGNHMTMLSTPSTKLWVGKLWQKLANTIR

SEQ ID NO: 4603 - protein, 271 aa, Xenorhabdus sp.
MSHIQRETSCSRPRLNSNMDADLYGYKWARDNVGQSGATIYRLYGKPDAPELFLKHGKGSVANDVTDEMVRLNWLTEFMPLPTIKHFIRTPDDAWLLTTAIPGKTAFQVLEEYPDSGENIVDALAVFLRRLHSIPVCNCPFNSDRVFRLAQAQSRMNNGLVDASDFDDERNGWPVEQVWKEMHKLLPFSPDSVVTHGDFSLDNLIFDEGKLIGCIDVGRVGIADRYQDLAILWNCLGEFSPSLQKRLFQKYGIDNPDMNKLQFHLMLDEFF

SEQ ID NO: 4604 - protein, 1065 aa, Xenorhabdus sp.
MEQNGDQNENIIMNTYTHKAILHTAFIGQQSSFSNPSDINDIDISYMEKTLQPWFDNVPSRLAKLAKIAPHDIAVSDPHGILEFGELQQRVISAAHVLRCHGVTMGSYVAIAAERGIPWFITMLATWQIGAVYIPLNTMMPEKRLNDILASLPDSILVSDETVSAELKASTHIPMERLAYTVEEITEDVVIPELGDHPAYIMFTSGSTGLPKAVQVQHDNLAAFLCALGKLLSVNQNDRMLALTTFSFDISVLELLLTVVHGGSIYIAPTETQRDAMALSRVFSEPQFTLAQATPVTWSMALNAGWTPRSDISMLCGGEALSQDLADQLTASGGTLWNLYGPTETTIWSTAFRMKKGDKVQLGGPIPGTSISIVDKNLRPVAKGTVGEILIGGLGVTAGYRNNPVETAKRYVPDVNGKGKRAYLTGDMARMTEDGSLIYMGRQDDQVKVRGYRIELGEIEIALRKQHGVQDAIIRVAGSGDFAKIQAFVLFDPNMVVSEEWVRETQVALRESLHEAWIPSEYYRIPYIPLTSSGKRDRKRLEEVAERLSTSHDAVQPETETEKRVYAIWGDLLAAETFGITDDFFQIGGNSILVARMVERIEKVFSLRIPISGIYVEPTIARIAAILDEMSEVHKNNLIPFNSVYRSEALIQQHAETLRKDVYLKESIRPDGLPHANWYEPDTVLLTGATGYLGLHLLEQLLKQTSAQVICLCRADDKAHALERIRDGFTHYQIDVGNSLDRVDFVIGDLGQPRFGLLPEIWDKLAQDVDVIYHNGALVNFIYPYSSLKSINVDGTRTALEFASTSRLKHFHYVSSVNALFATESPRPFMEDDRAMSETIRDPSGYSGSKWVSEGIINIARKRGMPVSIYRPGLILGHTRTGAAQGNDYLVASLKGYLEMGSYPAHGLLLDIVPVDYVAASLVHISKQRESDGKFFNLFNPVQVSIRQFFDWVQEFGYILNPVPFNEGKERILALDDSHSLYPLIPLIRDMTEKPYRALDPDYVHEIQPELELKQTLAALEGSDIQCPVITSEYVCQVLNYLISTGFLPQVLPTSYRQGVFSWNS

SEQ ID NO: 4605 - protein, 3835 aa, Xenorhabdus sp.
MSKANINIEMLKRAVLEKKVKEKIKQCANETRSLHMPITKTDRHAPLVLSFAQQRLWFIGQFDSAASRAYHIPVALRLTGKLEHQALISALDNLVARQESLRTHFTLVDDQPCQKIAPPDTGFSMSYLDLRSLSEDERSARVDELAESEARMPFDLTQGPLIRGQLLQLDNEEHVLLFTQHHIISDGWSSGILIRELAAFYQAALTGHDADLPPLPIQYADYAAWQRSALHCDELTVQRDYWYHQLNGAPSLLELPTDRPRPSVQSYRGSKIPVHLDGELLTALKTFAQNQGATLFMTLLTAWAIVLSRLSGQNDIVIGLPIANRTRTELDNLIGFFVNTLALRIESGQCHTIAELLAHVRKQTLAAYAHQDLPFEQVVEVLQPERSLSHSPIFQVMLALDNTPAQELKLPGLELSIIEQPQYSAQCDLTLSFTETAGNSGLIGTLIYATDLFDRETVVRIAGYFQNVITAMIADVNQTISSLPMLSAMEQQQLLVDFNVTQADFPQNALIHELFEQQVTQTPEAIAVVYEGQTLSYKQLNRQANQLAHYLIGLGIQPDDRVAICVERSPALIVCLLGILKAGGAYVPLDPTYPAERLTYMLKDAAPVILLTQVAQRDKLPDIVPVRVIDAQDTSLETRSSETLSLVTQPSHNPDAQALGLTSRHLAYVIYTSGSTGQPKGVMIEHRNVNRLAINGGYADIGPNDCVAHCSNIAFDASTWEIWSALLNGGRLHVIPQAVLLNPERFRDELISGEVTAMLLTVGLFNAYLEILSPLFRQLRYLLVGGEVLNPKKIQQVQLSESRPTHLINAYGPTESTTIATTYAITPAVNAAYTIPIGRPIANTQIYILDSSGQPTPLGVVGEIYIGGAGVARGYLNRPELTRARFLPDRFSAEADARLYKTGDLGRWLPDGNIEYLGRNDFQVKLRGFRIELDEIEARLNQYPGINESIVIAREDIPGDKRLVAYVQTQPDIELMPTKLRQYLTQHLADYMLPSAFVMLDTFPLTPNGKLDRNALPAPDLSAVITRDYAEPVGDVEIALAQIWQELLGLERVGRHDHFFELGGHSLIAVSLIEQLRNRGYSLEVRSVFATPLLADMAQAIQTGIDTPPVLIPPNRIPDGCTAITPEMLPLVTLSQTEIDTIIATVSGGAANVQDIYPLSPLQEGILFHHQLQENSDAYLLNALLAFDTQARMETFLTALQQVIDRHDILRTAFCWQNLSQPVQVVWRKTRLPVTPFIPTSPENISAQLQAHIVIPINITQAPLFAASTVYDPDSDEWLLGLSFHHLVSDHVTLELIMGEIQQLLQGETESLPVPLPYRNFIAQMLSVPASEHEDYFRQRLGDIDEPTAPFGLLNVQGDGTDVTDAQLSLEATLSQTLRALARQLGISPSVLFHVACAQVLAHTSGRDDVVFGTVLSGRLQGTTGADQVMGMFINTLPVRISLKNLSVLDVVKATAADLAVLLTHEQAPLALAQRCSNVSPPMPLFNVLFNYRHNSSDSIENSVLKDVRLLVSEERTNYPLALAVDDSGEDFSLVAQSVTGIDAERIVNYLHTALRELIHALINEPRQLVQELPILPVSERQQLLVEFNNTQTDFPQATLTHEQFEQQVIQTPTAIAVVFKEQKLSYDELNRRANQLAHYLIKLGVKPDDRVAVCVERSPDMVVGLLAILKAGGAYVPLDPAYPQDRLSYMLNDAAPVVLLTQSALTEKLDNQLPTILFDEPTLYALDDMPETNPDRRACGLNSRHLAYVIYTSGSTGQPKGVMIEHRSLCNLALSHLDILAAEPTDRILQFASHSFDACIFECVMALLSGASLYLAEREDILPGAALLRTLETHAITHLTLSPTALAAMDTLPATLKTLITAGEACPLSQVRRWSEGRNMINGYGPTEITICATTYQCNSQDDIAPPIGSPIANTRIYILDPFGQLAPLGVVGEIYIGGIGVARGYLNRPELTAERFLPDPFSTEPEARMYKTGDLGSWLPDGNIKYLGRNDFQVKLRGFRIELGEIESQLLQCPGVHEAVVLAREGEVHKGENNAGAQKRLIAYILPQPGVELIPAELRQQLMQHLAEFMLPSAFVILDAFPLTPNGKLDRQALPAHEQSAVITRNYEAPVGDVETALTEIWQELLGLERVGRHDHFFELGGHSLIAVSLIERLRCRGYALDVRSVFSAPRLTDMAQTIQTRQNISDSVVPPNRIPADCTVITPDLLPLVTLSQEEIDIIIATVPDGAANVQDIYPLSPLQEGILFHHQLQESGDAYLSNSILAFDTRSRLDAFLAALQQVIDRHDILRTAFCWQGLSQPVQVVWRQAKLFVTPFIPTSAENIPAQLQANMPCRLDISQAPLFAASTTHDPDSDEWLLTLNFHHLVSDHVTLELIMDEIQQVLQGREESLPVPLPYRDFIAQMLIVPASVHENYFRQRLAEIDEPTAPFGLLNVQGNGTDVTEAQLSLEATLSQTLRALARQLGISPSVLFHVAWAQVLAHTSGRDDVVFGTVLSGRLQGTTGADQVVGMFINTLPVKISLNNQTVLEVVQATAKDLADLLEHEQFPLALAQRCSGVIPPQPLFSTLLNYRHTSSHNSSDSTDKSSWEGVRLLSAKEWTNYPLDLSVDDFGDDFALVVQAVNSVDPRRVVNYLYTALCGLTEALQNNPRQPVLALSILPVAERQQLLEVFNATQTDFLPSNALIHTLFEQRTQQTPEAIAIISEQGSFSYDELNRRANQLANALIEAGIRPDDRVALCVERCPDMMIGILGILKAGAAYVPLDPNHPDKRRAYILSDSTPKLLLTQQHLQPQAQNPDIPVWLLDEADYLERVAQYAVANPEPEQLGLQNHHLAYVIYTSGSTGLPKGVMVEHRNVVNFIQAQCQITALNAADRVLQFATIAFDASVAEIFPTLATGATLILRPSHLQIPDAAFGHFLQEQAISVIDIPTAFWHQWGQEIKAGRSGFSSTLRSITVGGEKTNLHSLADWQSLPETQDCRWTDTYGPTEATVIVTSLSLNGGALLDAAETLSIGRPIANCRIYLLDKTQQLVPLGVTGEIYIGGEGVARGYLNRSDLIAERFVADPFSAEPNARMYKTGDLGRWLPDGNIEYLGRNDFQVKIRGFRIEPGEIEAQLVACQGVRDAVVIAHKTDKGEQRLVAYLVPQPDVTLEAADLREQLRSSLADYMLPNAFVMLDTLPLTPSGKLDRKALPAPELSAVLTRDYEAPIGDVEIALAQIWQELLGLERISRHDHFFELGGHSLIAVRLINCMNKQGMAVSLATLFSYPILCDLAQAINSQSAKLSSPLDANPVPLRPEGHLPPLFLIHETTGDPLVYSRLATLLPAELPVYTLQAMGLHTVENPPASIEELATYHIDAIRRIQPHGPYRLAGWSIGGTIAYEIALQLVSDGEKIDYLGMIDSYNLDSYNFSDHETDWQKDINLLIQSLNNYGEQLEGDDSDDLYDFRDCEALQWLPADVKKEDILFRLNTQKLILQLEKKYRISASSLPIHLYTCDDLAAGSDCWHGWHDIVSDRSERHPIGGGHYTIMQPPWINHLADSMTEHLLPASYSPHIIIQHGDDSVSPLFCIPGAGASVSSFIELALALPPQLPVHALQARGLINTDLPPYISVEGTARAYIKAIRQAQPHGPYYLLGHSYGGWLAFEIALQLQKQGEEIAALTLIDSDGPEPQESASKNSPPKVIDRIETLMSLIDIYNMMLTQPLTLTRQDFENLTEDEQIMLLLQALVDVELFPENTEKPLLQGIVQVMQANLNSNYTPQNCYNGPVYLINAQGENIDEIATRENIWRQYVTQLNTEIVPGNHMTMLSNPQVKQLATLLWKILREKLMTEIPEQK

SEQ ID NO: 4606 - protein, 2235 aa, Xenorhabdus sp.
MNLDDLKRAVMEKRLEEQLKARGYQQQQSMIKPADRNQPLPLSFAQQRLWFLCQFEPAASLAYHLPVILRLSGQLDRHALSASLDRLVERHESLRTRFVSVEGKPCQHIDPADIGCTLSYHDLSQLAPVLHAERITEFIDTEAQTPFDFTQERLIRGQLLRLSDKEHILLLTLHHIITDGWSTGVLIRELGDFYRAALDGHDISLSPLPVQYADYAVWLHEQAQGNSLTKQRDFWCEQLKDAPPLLTLPIDRPRPAVQSYIGGNVSFHLDVPLLASLKELGKRHNSTLFMTLLTAWSIVLSRLSGQDDIVIGTPVANRPHRELEGLIGFFVNTLALRITFNNDLSVADLLTQIREQSLAAYAHQDLPFEQVVEALQPERSLSYSPIFQVMMALNNTPAQELTLPELQLTPIEQKHRGAHFDLTLSLNEIGTGLAGDLEYAADLFDHPTAERMVGYLTHVLAAMVFDDNQPVNTLPMLPDSERQQLLVDFNATQTAFPQDALIHQLVEAQVLQRPDAIAISYEGQTLSYAELNCHANRLAHHLLALGIRPDDPVAICAERSPELIVSLLAILKAGGAYVPLDPHYPAERLSYMLEDARPVALLTQLAWYDKLDTFVPVVLLDNLLSEQEAPLAGYPTHNPDIQTSGLTSHHLAYIIYTSGSTGQPKGVMIEHRNVIRLLINNNVADITPDDCVAHCANISFDAAAWEVWSTLVHGARLQLIPENTLLQPVYLGQCLSSAGITTLFLTTALFNQYAGLLAPALPGLRYVLFGGEQADSRTAIQLWADHSPQHLLHMYGPTEVTTFATAYKIPFIERFHTEQIEKEIKIPIGGPIANTQIYILDSGKQPVPLGVTGEIYIAGEGVARGYLNRPQLTAEHFLVNPFSSEPDARMYKTGDLGRWLPDGNIEYCGRNDFQVKIRGFRIELGEIESRLSQCHGVQKALVLAHEEAGDEKTGAKTGSQKRLIAYIQPQPGVIPEPAELRQQLARHLADYMLPSAFIMLDNFPLTANGKIDRDALPAPEASAFAVRHYESPTGETETSLAQIWQQLLRLEQISRHDHFFELGGHSLMIVSLIEELRRVGWHLDIRSVFSTPVLADMAQALRRDADSFVVPENLIPEDCTAIVPEMLPLVTLSQAQIDAIVGTVSGGAGNVQDIYPLSPLQEGILFHHLMQTEGDTYLLQSLLAFDNRERLNQFLSALQQVINRHDILRSSVFWQGLEHPVQVVWRQAPLEINVFTPNTENNIQGQLLAHTDPHQHRIDLTRAPLFTADIAHDTAQNEWLLVLRFHHLVSDHVTLELIFDEIALILHKQETALPAVLPYRNFIARTLSVPVSAHEDYFRSRLADIDAPTAPFGVLSISNNENPETEQNNSITEAHLPLSPELSGSIRALSRHLKVSPSVLFHVAWAQVLAQTSSRDDVVFGSVLSGRLQGGAGADHIPGMFINTLPIRISLANRSVQVVVQDTYQDLITLLEHEQAPLTLAQSCSGVEHAIPLFSTLLNYRHSQTSEEKTPKNRWSGMRVIAAKEGTNYPITLSVDDLGSDFCLSAHAVAGIDPVRITHYLQTALCGLVDALMHHPQQLILHVPILPETERQQLLVDFNASSCKTGQADLSQDMLIHQLFEAQVLQRPDAVALTYEDQTLSYEELNQRANRLAHYLIALGVRPDDRVAICVERSAELIVGLLAILKAGGAYVPLDPAYPAERLALMLKDATPVVLLAQTTQLDKLPDTVPVFVLDSPDTSLDTQPTDNPDTQALGLTSRHLAYVIYTSGSTGQPKGVMVEHINVNYLVINNHYADIGANDCVAHCANTAFDASTWEVWSPLLNGGCLYIIPQSVLLDPVLFCVSLIRGKVTALWLTAGLFNEYFNTLKPLFGQLHHLLVGGDVLDPGKIQQVQQAESQPAHLINGYGPTETTTFATTYEIKSPVDVAHSIPIGRPIASTRIYILNSRGQPVPIGVTGEIHIAGKGVARGYLNRPELTAERFIIDPFSSEPDARMYKTGDLGRWRADGNIDYLGRTDKQIKLRGFRIEPGEIEAGLMQCHGVREAIVLSREDGAGQKQLVAYLIAQDGIELTPTELRWQLSRHLADYMLPSVFVKLESFPLTSNGKLDRQALPAPDMSAIVTRQYEAPNDEEEATLAKIWQSLLGLERVGRFDHFFELGGHSLMVGQLATRIQNEFLVEIPIASLFLSPRLADQAEIIFAAQKEAVGQNNIDSLQDTLDSMSAEELMAMLGGDSDK

SEQ ID NO: 4607 - protein, 1865 aa, Xenorhabdus sp.
SFRNFRGRPPELPTHNPNAQAWGLTSRHLAYVIYTSGSTGQPKGVMVEHRNVNHLVINSSYADIGADDCVAHCANIAFDASTWEIWAPLLNGGRLYVIAQSVLLNPEHFRDTLICGKVTALWLTSGLFNAYRETLMQLFGQLRYLLVGGDVLDPGKIQRVQLAECRPAHLINGYGPTETTTFATTYAITSPVDAACPIPIGCPIANTQIYILDSHRRLVPLGVTGEIYIGGAGVARGYLNRPDLTAENFLPDPFSTEPNDRLYKTGDLGRWLPDGNIDYLGRNDFQVKLRGFRIEPGEIEASLMRCEGVREAVVMLRDNASDDNESSQKQLVAYLLAQDGAELIPAELYAQLSQRLADYMLPGAFIILQSFPLTPNGKLDRRALPVPDPAAIITRDYVAPVGEVETTLADIWQDLLGLERVGRHDHFFGLGGHSLIAVSLIEQLRSQGYALDVRSIFTAPLLMDMAQAIQVRRGTSDNLIPPNGIPDGCTAITPDMLPLVTLSQNEIDTIVATVTGGAANVQDIYPLSPLQAGILFHHQMQENGDAYVLSSLLAFDSGERREAFLQALQQVIDRHDILRTAFCWQELTQPVQVVWRQATLKINTFTAPDNEQDVSSQLLAHTDPHQRCLNLNQAPLFSADIAYNPHKNEWLLSLCFHHLVSDHTTLGLIITEIRELLSAHGKEHHPLTLPPALPYRNFIAQIRTVPIEKHRDYFHQLLGDVDEPTLPFNLRNVRGNHEGLNKIEEARLTLGDQLTHQLRDCTRQQGVSTAVLFHIAWAQVLAQCSGREDVIFGTVLLGRSLQGAGASQVLGMFINTLPVRIMLQERTVQKVVQETHLQLSKLLEHEQTPLTIAQHCSGIQAPHPLFNSLLNFRHSPRSNQLAESPVWEGIQIFNSEERSNYPLSLDVDDFEDGFALTAQCNHQINPARINAYMNTALKTLVTTLQNMPQQNIQSLSILPPAERSQLLEEFNSARIDCPQDMLLQQLFEQQATLTPDVIALIHAEPMNREVQLTYRELNQKANQLAHALIDAGVRPDDRVVICVERGVDMVIGLFGILKAGAGYVPLDTNYPTELLNYILSDCTPTLLLTQQHLKTRLSADIPIWVLDDNNHTECMAQQPTHNPDSQQLGLAPHHLAYIIYTSGSTGQPKGVMIEHHNVVNFIHVQRQINELTPADRVLQFTSVAFDTSVSDIFATLATGATLVMCPSELRVPDNTFARFLQQQQITVADLPTAFWHLWVQEMVAGRCGFSPSLRLVIVGGEKAELRHLMIWQTLPETQSCHWINSYGPTETTVIATVLQVDRHSAYTGETLPIGYPIANTQIYILDNHGKPVPMGVMGELYIGGSGVARGYLNRPELTAERFLPDPFSTETKARLYKTGDLGRWLPDGNIEYLGRNDFQIKLRGFRIEPGEIEAKLTRYPGVREAVVVAREDQHGDKRLVAYLIPEQGIAEPEAKLIPADLRQQLSQELADYMLPSAFVILDAFPLTVNGKLNLQALPAPDQTAVITHNYEAPMDALETTLAEIWQTLLGLDRVGRYDNFFELGGHSLNATQLLARMHQQGMEIPLTTLFTCPTLCELAIAVRKQTITPAFSRNINPVPLSPEGSLPPLFFVHELTGNPLVYSSLAALLPPELPIYALQALGIHTLAEPPISINALAACHIQAIRHVQTHGPYRLAGWSLGGVIAYEIAMQLMHDGEEVTFLGMIDSGNISRYSTLPDKLMNTTQQRINRIIKYLQISIPEINDHTLEVLYQFNDVEQIVNHCINCQWLPTYYTRENLFLHIGTIEFLDQLSTDYIPQASELPIHLYKAENFIIDGDEWHGWQGVVANSSTLHPIGGTHYSIMRQPLINQLADSVSRILVPQKPQ

SEQ ID NO: 4608 - protein, 397 aa, Xenorhabdus sp.
PQSGSQKRTQKTVFSILSAISLSHLLNDMIQSLILAIYPLLQSEFTLSFIQIGMITLTYQVTASLLQPLIGLYTDKHPQPYSLPVGMGFTLSGLLLLAYAESFPMILLAAALVGTGSSVFHPESSRVARMASGGRLGLAQSLFQVGGNLGSSLGPLLAAIFIAPYGKGNIGWFSLAALLAIIILLQVSQWYKMQYRTTSRHASNTRFEPVFPRKIIVRSFIILLILIFSKYFYLTSISSYYTFYLIQKFGVSVQNAQIHLFVFLFAVAAGTMIGGPIGDKIGRKYVIWGSILGVAPFTLLLPYASLFWTGILTVIIGLILASAFSAILVYAQELLPGNTGMIAGLFFGLAFGMGGVGAAALGYIADKTSIELVYKICAFLPLLGIFTLFLPNIGNKH

SEQ ID NO: 4609 - protein, 400 aa, Xenorhabdus sp.
VHTKDFSWQYSLTATILLLSPFNLLPSLAMDMYLPVMPFIADALGAGTGTIQLTLTMYMILFGVGQLLFGPLSDRFGRRPVLLSGGVVYTLASFGLAITSSPEIFLGFRIIQACGASACLVAMFAAVRDIYSGRKEINVIYGLLGSMLAMVPAIAPLLGTLVDVWLGWRAIFVLLGIAMAATVIVYGIFCPETRQQRTAALKWSQLLLPVKSMNFWLYTFCYSAGLGSFFVFFSTAPWVMMNRQGLSQMTFSLLFATVAIAMMVAARSVGNFIVRWGLLNTLRMGMFCLTAGALLLSAGETFIPNSVLGFIIPMWLVGVGVAIAIAVAPNGALQGFDHMAGTVTAFYSCLGGVLLGIGGTLTITLFSNTTTWPIIVYCLVLAIGVFCFSYINSRQSEPRY

SEQ ID NO: 4610 - protein, 394 aa, Xenorhabdus sp.
MRKIAHFNLLLMLIALAAVGQMTQTIYVPVIADIANSFGKPAGEVQRVMAAYLFAYGFSQLFYGPLSDKVGRRPVILAGMSVFLVATICALFSSSLLALVIVSVFQGLGTGVAGVMIRTVPRDLYTGASLRCANSLLNMAILVSPLLAPMIGGVVGHYFGWRACYWFLLLLGSGVILFLFRHFPETRPEQTTQSTMLVSFHQLLSNGIFVSYLIMLIGGLAGVAVFEASCGVLLGAVLGLDSLTVSILFILPIPAAFLGAWYAGRENKTFYQLVWNAVICCLLAGTLMWLPGWFSIMNVWTLLLPAALFFFGAGMLFPLATTGAMEPFPYLAGAAGALVGGLQNVGSGVATWLSAMLPQNSQFSVGMLMFCMALLILLCWLPISQRIQQQERTV

SEQ ID NO: 4611 - protein, 153 aa, Xenorhabdus sp.
KVIRALNALGATPTDLMSILQAMERAGCVRAKLTETFSVLCTTFSPDLPQFMMNYCADIEQYGSNTRLYPQTEKPKNHINISSIPWIGFDGFNLNISDITDYFSPIFTMGKYQQEGGKVLLPLSVQVHHAACDGYHVALFIKKLQALCNDALM

SEQ ID NO: 4612 - protein, 153 aa, Xenorhabdus sp.
MMITHQLATLNQTEIQAIIGGVMLLCQHSPLHRRYLVAEWQQRILPSFQLNQFCYYEDEHQRPVAFCNWAFLSDSSRAAILSGEREILHEDWRSGQHIFFPEMIAPFGHAHDIARDLRRRVFSAWKGQRACTVRGILDVKNDRCIRRIQWFTV

SEQ ID NO: 4613 - protein, 413 aa, Xenorhabdus sp.
MFKAILRKGLKRLRSPSQHYDFLPTHLALSQRPPSPFARYTAIALSISVLVLLLWAYLGKLDVQATATGRLIVSGRSQVIQAYEQSRLAIIHVTNGQHVEKGAELLTLNTLGVNQDITRMLEQREYLTEEKIRYQALLDNHAPESSELFQQQSAISQKKILTHYQHEKQEFDAVVTNIYAEMNVNLSSQKAKENDIQALSNLRQNISQRLQARKTLSQQQVISRMEYLEKEKEFLETERLLTQQRAELGVLITQNKSLEERLKSLKTQKDREWFEKIKQADMQLSVLKQELSKMKEREELSVVRSPVTGTVQQLSVHTLGAVLQPAQNLMVIVPDDHIQLAEVQILNKDVGFIRPGQQVTVKVDAFPYTRYGTIEGRLLSVSRDSTVDERLGLVFPAQISLNQNNIMGDGEPD

SEQ ID NO: 4614 - protein, 146 aa, Xenorhabdus sp.
MGKSSNRSTEYFFTGRYEDDNDGNTIHAIGVGGVINAYGGNDYIVVGSIGATVNTTWGHDTVVGGAGYLNINDTSGSLTVKGGSGYTAINKTHNGTIEFAGAAGGLNINHTGDNGAINYAGVSGYNGITRKGVKGDISFKGAGGYN

SEQ ID NO: 4615 - protein, 1607 aa, Xenorhabdus sp.
CALKVRLVMEAVTREYGQDVTNAIFSKLKASDLAKDGIGIDISGLKKVHREIERHLSPVSATLYIWKPSDHSSVGHAALQIGHGRVKVTPEEVRDFNDMNYVSWWPAGSKSLNLQELMETNNSQSDFRIRWRDLSMPAHQNPALRYDVASEEDDDFGLVDGSGELKEFVEKLRAVKGVDAKFKDVSESFAMAALANPEMLKSAEIPPHIYQPFLAQWRDDNMDMQEVAQRFAEVLRMAAELQNSKRMEHLIGNVTRQFAERELADINAFKDGKADQGRVFRINLEGLDVAAMQAEWEKISTDPDARYQLLAKNCSTVVARVLKAGGAENVLGHAWRPGYGIWKPNDLFQFGQALQKATQAERIKYKYRRLNSDGVGRILDQPDDLYEEILEKVAIENDGSPLRDSEPRNPLARFMNNELYGMRDDRRRISKAVQIGLSRAIERKMAEKVTLRGEAGRLEGYYHLSAVEPSDKVVLFIHGSGSSAEEQASKIQTHYQQQGVDMLAVSMRGYGTSDGRPSENGLYQDARTMFRYLVNNRGIKPENIVIHGYSMGAPIAADLARYVGRRGQPVAGLLFDRPMPSMTKAITAHNILNPTGVVSVLAKSVNGKFSVEKNLQGISKKTPIMVLTGRDGLGTEGEKLRTKLIGTGYNISGEHTYLGHDSSRRMMELYANKIVTNLFESSLSESNLSASSLFETNVREQESAAIKGIRNDLKRYMQFLQSHTDKTGRVYDLRATKKFLSGYGHNQAEHLVESFHADMGIKQLVDLLLKGNWTAEQKGALSWEIENRALKLSLRPRIEKYSRLFRDVASTGAEDLQANEHLAPQLMLLNLSNDGFGGRCMPLSELVLLAKHLENDGQDNVSNDFLKKLYSAASVLSHPELYAESEKANASKLLGALSALYIRAPMYDNTFRVWKKKLSGNQALTVKDVIDEITVSNVNGRAILLELNTSDHAMAAWSKDNSGTRMYGFYDPNVGIVEFSSAEKFSAYVKRFFSRSGMNMAQYYGMPKNEHQESFFNQVIVVDGRALASYRPVIDDKMNLRDILAMEIFDGSPMKNALGTERPLHNQNVASWEDITVTPQPESGSSRFDSQIIIQTENDPVVARAVANLAGKHPDSSIVVQFDSTGQYRVVYGDPARLTGKLRWQIIGHGREITELNHTRMGGYNAAELAINLKQFSRDFRYGGTPEHISLVGCSLISDDKRDGFARHFMTELKQQGIRASVSARSSNIAVDNTGRKYTRRDAQEQWVHKLHDNKTVLNWNANDELETRSERVRHGISESDIVLARIGSRNTSTAATGAIADNRETFHSSRKRLVQNNDDASRPSKNNQLSYSGNVQLQIGDGEFTSINWGTTNVGLKLGTGGFKSLAFGDNNVMVHLGDGDSKHSVNIAGYQALEGAQLFIGNRNISFNQGRSNDLIVMMDKSIPTPPMLNPFDGVSRMSGVLQDISGSFSSPGWLAAQEEQWTIASVKKYLQDMSGLDLTSSVDYRSLTEMGSQELRSGRGLKNDIESSLNKKYNQWLGGEAPKVSNLSRADRFRQANEKLAFNFAVGGRGADIQVTTGSWNFMFGDNIQSLLDINLGSLFGLMTQQYTTTGLARTTFTYSVLFR

SEQ ID NO: 4616 - protein, 2077 aa, Xenorhabdus sp.
MGKPFWRSVEYFFTGNYSADDGDNNIVAIGFGGQIHAYGGDDHITLGSIGASIYTGAGNDTVVGGSAYLKISDTSGNLNVKGAVGYAEINKEEEGSISFAGAAGGAVIQHDGRSGNIHYSGVAAYNNLYRRGYSGDITFKGAGGYNHLYSDVVNGNIHFMGAGGYNQITRKGLNDSFNGEGITYAKAEEIVLTTATLGGSWSQKTQHIVGIKSTREINTFLFAAIDDKYTKINKVRIHNDPKTGRLKYYTTSWHKAGNHLNNLASQDISDAGGYQLVNVDGVYKLSDLTVEHHQSFTIHALESELSEDEWVTYAGGVQIAAENITLSDARMGGHAVSMDGSTFDVKPVKSNQMANTYLYAKFVGGITKVVVVQLANDPATGELKYIATPWYKAGDQTAVMANQTIGTRSGYKVIGKGSYTLSHVNYRVNTVRVTSERISSMHEFSERELLDQKQDDSNGDIRFEGAGGGNVIKSNVAHGNVYFKGAGVANVILHNSEIGDTEFSGAGAANVIFKKNRKGNLIFNGAGIANVITHVSNTHPTLDSSAGSYNGDTRVIAHGGANVLTRKGNGRVFSVMGGGANVLTHSGNGRTTGVMMGGANILTKVGNGETTGLMFGLGNVLTHVGNGRTLGAMGAVGNVFTKVGDGETIAAMLAFGNIFTHTGQGNAYAMMAGGGNVFTKVGNGDALALMVALGNVFTHVGDGLSVALMVAKGNLATKVGNGESLAAMIGVGNVMTHIGNGNTFAAMVGEANIFTKAGNELTAAVMIGKANIYTHVGQGTSIGLFAGNANIMTKVGDGTTLAAMFGQANVMTHAGSGLTGVLALGEANVVTKVGHEFMGVVAAAKANVITHVGHGVTAGVLLGKENMLTKVGNGTTVGLLVSKFGNIMIHVGDGNTVGFAKGSLNLMTKMGDGLAVNAAWGDANIMTHVGAGDHYNFASGKANLVTKIGDGRAVSVVQGSANILTHVGHGDDYTGAWGKANVITKVGNGRQVTLAKGDANIVTHVGQGDSFNALWSQSNVVTKVGDGMQITAAKGESNITTSVGNGLSVVAAHGDLNINTKVGNGISVNVAWGKLNVSTKVGDGLNVSVMKGTGNASVHVGDGMNIHASYARNNVAIQVGNGDFYNLALASSNTESHKLATLFGNIKQTLLGAMGSQGINFLVHGDEANTSGSYRGRGAINLPEVDGLKGFKLTEIGEVSSTLSADLHASVSQLETPDVSRLETIMNEEGQSGKNQKPNLIINGDFENGTLGWQATNGIEAQHPAASYGLDDAGHGRYVSELDAQVNTTIYQDLSQLKAGEAITLDFDFARRAASTDDNGIEVLWNGQVVFSSANDSIAWQHKQLVLLAQAGSNRLAFKGIGKDDGRGYILDNIVATSDRSDNSHDGELASKNVVAESVLADKSSAEADHERLAQEKEQQLAAIAGTQNQLESTDFDALNTNGLAQRDVIREEQQAVTDELLAKAKALELLDEQTHAHHQGESGAHWRHDFAGELLDKLQTQVDTSKATAGQQLDNALSTALQQQQKIENSLDKSEINVAKSKQDQLNVGKDVADARMKAEYRKEEAEAQQNQAEQAKLSAGRTLQDIEAEASEVAKNNGYTPRFSNVGSNRSGKAYEAERIGDTTSHINSTTLMQEVGAFSKKLQESESDLSALADAKQAVERLQINAGLRATQANSTHIPRSPRTQQLPHSNVSPESVPDISVPENRKSLSVSGLDLSGLKPLGRSDSRGSSVRSNLSQKSSSTYPFIGERAEKVAEIYRWLDSGRDQLNDHAKSNYIPVPGGVRPNVEINDNIRDRLTDFIENFFSIIRHTIPKDQIAPLAKLFVDSTLDFDWDKRVQFITKLERFGYSFEPNHGEKSIVSFWSGQEFSIYRSVLDAVQPDDKKVVYDIDVKGNVLALELNKKLMDWCNTSLDPDDFQQERLHTAISEATRSNIGFWCSVYATGARDDVYVIAPSGVRLGNFFWNVELPVLRQLQREGLVNEIRLLDKHAYHYRGKPLESIGHRLTDPGVRVKMRFDSLSPAEQMRYLEQDPDGYHANTLIDLDIKVSAIDSMLNQAIPFYRLRTDRNILIREG

SEQ ID NO: 4617 - protein, 4099 aa, Xenorhabdus sp.
EGIEYANAKKIILKSATMNGSWIGSDNQVSGIKSTREPNTYLFAFADGTYTKIHKIQLRNDPATGKLTYHSTAWYKKGNHLQGLEKQDISAQNGFVDVGIDGAYTLSNLVVEHQQSTTIQAVEQKLTENEWMKYGSGVRIKAADVILSDAKMGGYAVYQDGTKVDVTAVKSHRQPNTYVYAKKLGVYTKIVVIELRNHPETGILQYIARPWYKEGDHTVNLADKIISESYGYTPMGTGGYSLSDLHYSARMVQTTTERVASTHEYSDQSLFPVTERRETSGDVRFEGAGGGNVIKSNVTKGNVYFSGAGIANVIEHTSEFGNTEFNGAGGANVIIKKGKEGNLKFNGAGIANVLLHQGKRGDMEVNAGGAANVLVRVGDGRYLAHLLAVGNISIHKGNGNSRVSMGGGFNTHTQIGHGDAVWSGVGGANVLTQMGQGKVSAILAGGANILTKIGEGSLESGMLGGANIITHISNRSDATKSDNTKVIALGGANVLTKKGRGDLLSVMGGGANVLTHVGDGRTSGILLGGANILTKVGDGDTTGIMLGLGNVLTHVGDGQTLGVMAGAGNIFTKVGDGETIAAMLAFGNIFTHVGEGNAYALMAGGGNIFTKVGNGDALALMLSFGNVFTHIGDGMSVALMIAKGNIATKAGNGDALAAMIGKGNIFTQIGHGSTFAAMIGGANILTKVGNDLTAALMIGKANIYTHVGEGTSIGLFAGTANIMTKVGDGTTLAAMFGKANIMTHVGDGMTGVLALGKANIVTKVGNDFMGVVASSEANVVTHIGEGTTAALLNGKGNILTKVGDGTAVGLLVSKIGNIMTHIGDGDTIGFAKGEANIITKVGDGTGVNAVWGKANILTHYGDGERYNFAKGEANVITKVGDGQEITVVQGQANIITHIGNGDDYTGSWGKANIITKVGDGRNVVLAKGDANIVTQIGEGDSFNALWSQGNVVTKVGDGIQATVAKGKGNITTTVGDGLSVTAVHGDLNVNTKVGDGVSVNVAWGKYNVNTRVGDGLNISVMKGTGNANIRVGDGLNINASYARNNVAVQVGNGDFYSLAVATSNTQSNKLGALFDNIKQTLLGSAGSQGISYLVNGDEANTSGTRKGRGAINLPEVSSLDGFKLTEVNEVTSDLHNSLQGAVSEVNTPDTEAMQRSLSREKRQSDNLIVNGDFEQGSAGWHSTNGIEAHSSAASYGLSKEGHGERVSELDVDINTRIYQDIDGLAEGEPISVSFDYAMRAGLSDDNGIDVLWNGELVFSTWADDTGKAEWKNKTLTLTAQAGSNRLEFAGTGVSDGLGFVLDNVVARSEWSDKDIADYVEQDQAATNALQDKEKAEADRQRLAQEKEKQLAAISGTQAQLENTDLTALNANGQLQREAIRDEAQSITQELIAKTKGLEALNDYSTHDGQSGQQWRDQYADGLLGNIQTQLDSAKETAQQQLEHSQQASAEHLGEVKDAVAKSESGADKGEQDRQQSMQKIDDARADIEFREQEAIAHQQQAEKAGRDGKSAAQKAEQRGQHAVSAAEIKTAQVQSDAKAAKLDSNKLPNREKAAGSGLSGQIPADTDTKKQAENQAGKTHSFIDAESAVQAENEFAPELQYLEEDLGELDNAKAALDRLQINAGIRARKQHITPNVDNTGIAQPSVSKPSSTVSTDKTPATSVRRELSITGLDLSGLNALGAGKSQPEHTDTQENSGAALRAQKVANIYQWLDSDNNLATENYIPVPGFERVDADIPDALRQKMVTFVEGYLNGTENSIPKEQRTSLAKLFVDATIDYNWDKRVEFVSRLEHYGYSFEPVHGDKSIVSFWSGRNFKQYRNILDAAQTDGKKVVYDIDVKGNSFAIELNKTLMRWGGIFLDPDVAEQNALKSVINASARSNTGFWSSLYATGSRDDVYVIAEGGLRLGNYFWNVELPVLRQLQREGLVGEIRLLDKAAKEYQGVLPENIGRRLTDAGVSVKARFDSLSFEEQERLLAQNPTGYKPDTLIDLDIKTSAIDTLLNQALPFYGLRTERNLLVRESDDYDGFEIRPWPGRNSDGSEITSFKNIIVEDTDNTEQIKAIERFILANYDNYQQLPDTLYLVEDRIVSHDNGRTRILAEKTDGSWRYKPKTELMSADELQAAAYVKGKIRGDSYQHVLDALADYENELKNSRDYDLESIEKLSGLRQQVEGYLLGHPDSERTPALKNLLSQIQVRLNETLAIAESAVESTAKGSFSDLYNKLSNASLKESKHLYIDEQGNFVTRGKSNIQTVVKTEWAEKAIEQVKTSVAKEYGQSVAEAVFSNLHPRDLAKDGKGLDVSGLKKIHKAIEQQLSPVSATLFIWKPSDHSRLGHAALQIGHGRMEITAENAAEFNEKHYVSWWPKGGKSTSVRRIFDVSTAEHPDVKLRWRDLSQPAGQNDALELDVASEEKDNFGLHDGSRKLERFIEKLQVAKGVDARFEEISEGFAMAALANPNLLKSAGVPEHISRPFMQQWEDGSIDMLEVGKNFAEALRTAAKQQTPELTEKRVANVIRQFAERELSNIQDFKASEPDQGRVFRINLAGLDVAAMQAEWHKISQNPDARYQLLTGNCSSIVAKVLKAGGADQVIGHKWQPHFGVWTPTELFNYAQALQESQAAQAENTVRKQNRRMGEDLTDQDQTEGNDKNQIPEIVETKRVEKVAIENDGTPPQDQEPFNPVKRFLNHELFGAKDARRNINEDTQILLDYAVESGTAEKVTLGGDAGRLTGYYHVSDQRQAEQGSDAATSQNPSRKVVLFIHGSGSSAEEQSGAIQNHYQKQGIDLLAVNMRGYGSSDGSPNEKGLYQDARTMFHYLVNDRGIKPENIIIHGYSMGGAVAADLARYAEHHGQPVSGLLLDRPMPSMTKAITAHKVPNPAGITGVLAKAVNGQFSVEKNLQGISKQTPIMLLTDNEGLGDAGEKLRTKLVAEGYQVSGEQTIYDHTASNRLMNQYAEQIVSGLLPAKDYNDTAISEVKKPLKDNTPEAVERVVNNQHVETWEKVAVKPHAEGGESRFNSQIIIQTENDPVALQAAVSLAGKHPDTSVIVQLDANGQYRVVYGDPAQLSGKLRWQIVGHGRDESAQNLTRMGGYSADELALKLKRFSEGFRQAGTPEHISLVGCSLIGDDKRNGFARRFISALDAQGLRTTVSARSSEVAVDSTGRKHTRDAQEQWVHKLVDNKIVLGWNNKGELESYSEHIRRGISESDIALSRVGHSGAEAEAKGAIAENTETFHAPKQRKKENDSAPNSNAPNDTASDRHLSYSGSIDGQVGDGEFTTINWGTSNVRFKVGNGGFKSLAFGDNNVMFHIGNGDSKHSVDIVGYQAFEGAQLFVGNRNISFNLGRSNDLIVMLEKSIPTPPLINPFDGAARISGVLQSISSQNSTGLFSSADWLTAQDQQWTLEGAKKYVSDLSGLDLTSSVKYETLTELNTENERSSRGLKNDLENTLNKKYNQWLVGEGNKPELSQLSRADKFRQANEKLAFNFAVGGQGADIQVTTGNWNFMFGDNIQSILDTNLGSVFGLMTQEYTATGMAKTTFTFSPTDLPRQIKNKLLGNLAGVSANTTLADIFGVDYTPDGRIVSRSGQPVDGVAIMQEMLEIIGEFSGDQLKSFTDPQKLLDGLKAGLNTGTDGINSFAESHGLKAKAPDDTSEDKISLNEGDKPIEQTESEQPERAFGFNALNLPNLFATLFSQDKQAEMQSLVSNLKENLTADLLNMQDKTFDFLRNSGHLQGDGDIHISLGNYNFNWGGDGKDLGAYLGENNNVWGGRGDDVFYSVGTSNIFAGGEGNDLGVLMGRENMMFGGAGNDVAVLAGHINYAYMGEGDDQVFAFGEDGVIEGGKGRDYIVASGNSNRIDAGEDQDYVVTIGNHNQVLLGAGDDFATVLGNDTRIDGISGNNAIKLMGYHAVINGGAGNDHLIADVVSKFSRFNGGEGNNLLVLGGYQNHFKGGSGINSFVVSGDVIDNVVEDIKLGDRIIFNNINWQNLWFQRSGYDLVLLTNRNICDTSEQGQFEALGSVTFTDYFNGNRADIITRMGNKDTQGECEYTALSASAVDTLVQAMSGFAPDIGDSGFIDFLDSQTKSTIITAWADTTSGKSKLT

SEQ ID NO: 4618 - protein, 2154 aa, Xenorhabdus sp.
ADAGLKQVMAAVTKEYGQDVTNAVFAGLAAHDLAKDGKGIDIAGLKKVHLAIEQHLSPVSATLFVWRPSENSTLGHVAMQIGQGRVQVNAEDATHLNQINYVSWWPAGNKSTDIRELLNIATPDQPDLRLRWHDLSQPAFQAPTLTFDVEAEEDDGFGLADGSAELKEFLEKLKIAKGVDVKFSDVSEGFAMAALANPELLKSAEIPQYIYRPYLAQWADPGMDMHEVGRNFAEALRLAARLQNSRRMEKAIASVMSQFAERELAEIANFKNSTVDPDRVYRINLEGLDVAAMQAEWGKISSDPDARYQLMTQNCSSVVARILKAGGADKVLGKAWRPGFGIWTPSELFDFGQSLQEATQSERVKQKHHRLDTALNHGGTGEQPERAEKLAIPDDGSAPHERTPKNPVTRFMNSELYGTKEERRQISQEMQNRINLAINSGVTEKVTLKGEAGRLAGYYHKGQNTSQRDTSDKKVVLFIHGSGSSAEEQVGKIQPHYRQQGIDVLSVNMRGYGTSDGYPNEQGMYQDVRTMFHYLVNERDISPENIIIHGYSMGAPVAADLARYVDSKGMSISGLLLDRPMPSMTKAITAHGIPNPSGLTGILAKAVNGKFSVEQNLRGVSKQMPVMLLTDNEGLGNEGEKLRTRLVASDYNVSGEHTYYSHASSYQIMVKYAGQIVANLSEAGSQVHEQESTILKGIKNDLMRYTQALKPQVDNQGREQDLRATKAFLSGYRHNHANQIVDGFHSDMDIRQLVDMLVKGNWTAEQKGALAWEIEHRALKMTLRPKVEKYSRLFRDVTSMGAVDAKASEHLAPQLLLLNLSNDGFGGRCVPLSKLVLLAKQLENDGQENVGRSLLNKMYSAASVLNNPELYSEGEQANASKLLGTLSALYARDPMLDSTTKIWKEKLSGEQALSVQGVIEKITAANAGKNPILLELNTLGHAMAAWSKGSGENRTYGFYDPNVGIVEFSSAEKFSDYVTRFFGQSGLNMAKSYNMAKNRQRERMFGRVVVLDGEALAAYRPVFGDRTTMKDILAMEIFDGSPMRNALNRLHPLNNHDLSEWEEIEVLPRLERKKMRFDGQVIIQLEDDPHVADSVSYLAGKHPKESVLVQLDRNGQYKVVYGDPSQLSGTIRWQVVGHGGDEIDGYNSTTMSDYKAPELAMRLKQFQNSFQHGGKLDYISLVGCSLLSDDKRDGFAYRLISALDENGIRTTVSARRTEVVIGKSGRKYTRSEHNKAENKITENKIVLSWTDKGEVEGNAERIRNHVSENNVSLVRVGSLRSSTNSRKHRPHEVMTEKNAIADNTETFHAPKKHQHQDYPVGTSSDNRLSYSGNVQLQAGDGEFTSINWGTTNVGIKVGTGGFKSLAFGDNNVMVHLGDGDSKHSVNIAGYQALEGAQLFIGNRNISFNQGRSNDLLVMMDKSIPTPPMLNPFDNVSRVSGILQNIAGSYTTSDWLSEQEAQWTTESVKKYLQDMSGLDMTSSVDYTSLTDLDSQYKRSGRGLKSDIESTLNKKYNQWLSGAGNKPEMANLSRANKLRQLNEKLAFNFAVGGQGADIQVTTGNWNLMFGDNIHSILDINLGSLFGLMTQQYTSTGIAKTTFTFNPADLPRQLKNKLLRNLASVNADTTLGDIFGVDYTADGTIISRTNQSVDGVAILREMLEVISEFSGNQLSAFVDPETLLNGLKTNLSAGADGVSSFLESHGIKEKAPTEQITSAENTSDENTQSERTFGFNSLNLPNLFATLLKQDKQEEMKDLVSNLKQNLTDDLLHMQEKTFDFLRTSGHLQGDGDIHVSLGNYNFNWGGDGKDLGAYLGDNNNFWGGRGDDVYYALGTSNIFTGGEGNDTGVLMGRENIMFGGQGNDVAVVAGRINYAYMGEGDDQVFAFGEGGVIETGRGRDYIVASGNFNRIDGGEGQDYVVAIGNNNQADLGDDHDFATVFGNYNRIDGGAGNDAIKLIGYHALISGGAGDDHLIADVISKFSQFDGGDGDDLLVLGGYQNRFKGGAGVNSYVISGDVIDNVVEDLKRGDKIVFNELNWQDLWFQRSGYDLVMLTNRHVEDSSEQGQFEAIGSVTFTDYFNGNRADIVTRLGDKNTHGEREYTALSANAVDSLVQAMSGFAPIIGDSGFIDALDGQTQSSIMMAWSDTTTGKSRLV

SEQ ID NO: 4619 - protein, 105 aa, Xenorhabdus sp.
HGERVSKIVVDINCSMFENMDGLVEVDMIRVSIEYTMCSGVSVEYIIDVLWKGELVFAFWVDEAGIEVWKVRKFPLIAQGASKWLEFMGFGMSNKIGFVVDDVSA

SEQ ID NO: 4620 - protein, 71 aa, Xenorhabdus sp.
MDEKQLQALATELAKNLKTPEDLSQLSRFLKKLTVETALQAELAAHLGHEKHHPKTGSNTRNGYSAKTLLT

SEQ ID NO: 4621 - protein, 100 aa, Xenorhabdus sp.
MGYSLDFRKRVLAYKDKHSLTFEQTCTHFEISMRTLFRWRHKIEPCVTRNKPPTKISDEALLTDVKNYPDDYQWERAKRLGVAQSAIHYALKRLKITVKK

SEQ ID NO: 4622 - protein, 196 aa, Xenorhabdus sp.
RGEVLAGRTDRPPYRGLKDIFIACVDGLKGFPEAINTVYPQTRVQMCIVHMIRNNLRYVSWKEAKAVVKDLKQIYQAPTEEMALQALDAFAEQWDERYPQISRSWQENWGNLSTFFAYPAEIRKVIYTTNAIESLNSVIRHAIKKRKIFPSDDSVKKVIWLAIQAASKKWTMPIQDWRLAMSRFMIEFGDRLDGHV

SEQ ID NO: 4623 - protein, 105 aa, Xenorhabdus sp.
QLIKEFDERGVAIRFLDDGISTEGTMGKMVVTILSAVAQAERQRILERTNEGRLEAKAKGVKFGRKPTIDKAQVRHLHEQGIGATNISRQLKIARATVYKILATV

SEQ ID NO: 4624 - protein, 157 aa, Xenorhabdus sp.
ARAMCSKVFTDKVTGSSLDREGLQMLRLKIEEGDVILVKKLDRLGRDTADMIQLIKEFDERGVAIRFLDDGISTEGTMGKMVVTILSAVAQAERQRILERTNEGRLEAKAKGVKFGRKPTIDKAQVRHLHEQGIGATNISRQLKIARATVYKILATV

SEQ ID NO: 4625 - protein, 109 aa, Xenorhabdus sp.
KIDELGDPLLVLDKYVDFSALADTLDRIVPRIISPKGGRPPFPTEVMVRIIILKHFHNLSDEKMEYQLLDRMSWQRFCRLTDGINIPDRNTIWCFEKTDWAGKGQERYL

SEQ ID NO: 4626 - protein, 145 aa, Xenorhabdus sp.
SSAHTKWLCKYHIVFSSKYRRKVIFNNIRSSVGEILRDLCKYKGVEIIEGHLMPDHVHMLVSIPPKLSVSSFMGYLKGKSSLMIFDRHANLKYKFGNRKFWAEGFYVSTVGLNEATIQKYIREQEKSDLISDKLSSKEHVDPFKG

SEQ ID NO: 4627 - protein, 295 aa, Xenorhabdus sp.
MNTIALIGIDLGKHSFHVHCQEQSGKALLRKKFTRTKLMEFLADCSPATGVMEACAGAHFMARRIADLGHEAKLISPQFVRPFVKSNKNDFIDAEAICEAASRPSMRFVQPRTEAQQAMRALHRVRESLVRDKVKTTNQMQAFLLEFGISMPKGIAVIKRLSAVLAEHELPPYLVQVLLRLQAHYHYLVEQITEIETALSQEVAQDDIGQRLMTIPGIGPITASVLSSQLGDGKQYSRSRDFAASTGLVPRQYSTGGRTTLLGISKRGNKTLRQLLVLCARSFMQQIEHRQALEH

SEQ ID NO: 4628 - protein, 133 aa, Xenorhabdus sp.
RYGSHTVFQIEYHFVWVTKYRHKVLIGEVGLRVRELVRQTCEAFEIRIVEGVVSKDHVHILVSCPPSLAPSEIMRRIKGRTASKLFEEFAHLKKRYWGQHFWGRGYFCATVGQLTEEMIKAYLAHHFEPNPND

SEQ ID NO: 4629 - protein, 135 aa, Xenorhabdus sp.
HLSLETDETAQRLMTIPGIGPITASLLSSQLGDGKQFSCSRDFAAATGLVPRQYSTGGKTTLLGISKRGNKNLRRLLVQCARAFMMRLEHKQGRLAEWVREQLNKKHSNVVACALANKLARIAWAITTQQNEYQV

SEQ ID NO: 4630 - protein, 454 aa, Xenorhabdus sp.
IARDSRVLHAREIQRLASERRHATLAAFVIEKQAAITDLAIDMFCKLIGNTRRKAEISQKERRLKAAEVLEVVALDHIKLGQALLAARDGNTDFASAITASLGWEGLIASMAAAASVASPQRNTEFDELIGRHKSLRKLGRLIFGTFSFRAFRPDEPVLLAVGHLRALYCGRKLPNRVPLDFMSRKWQRRVSPVGKNTDLQAWEVAVFVHLRDRLKTGDIWVDGSRAWRSFEDYLLPRHVFDQMRAESRLGLAIPDNFAEWRAERTATLNAKLKALAKAAANNAIPDAELSDRGLSVSPVREEDSDRITTLSRKLYMLVPRIRITSLLAEVHGWTNFLDCFTHYRTGEQAEDEAALMAAILADATNAGAERMAQSSRGVTIHQMMLMVDRHLRAETYAFATSVLVDAQQEHPFATIWGDGHVSSSDGQFFPAGGRGEASLEYNAKYGKRPGASV

SEQ ID NO: 4631 - protein, 133 aa, Xenorhabdus sp.
RYGSHTVFQIEYHFVWVTKYRRKVLTGEVGLRVRELVRQTCEAFEIRIVEGVVSKDHVHILVSCPPSLAPSEIMRRIKGRTASKLFEEFAHLKKRYWGQHFWGRGYFCATVGQLTEEMIKAYLAHHFEPNPND

SEQ ID NO: 4632 - protein, 80 aa, Xenorhabdus sp.
EKQSCETLLSPLAWKLLWTKQEKKKLPKTAPSIYWAYINLGKLAGWYDSKRNGRVGWERLWEGWFMLQTILDGYLLSKSL

SEQ ID NO: 4633 - protein, 109 aa, Xenorhabdus sp.
MYHKILGIDLAKSVFQLCLLNDNHIVFNKKMIRSRLVDTVRQMESGTLIAMEACSTAHYWARTIENLGFKVCLIPPQHVKAFVKNHKNDANDALAICETAIGRVCILFR

SEQ ID NO: 4634 - protein, 102 aa, Xenorhabdus sp.
KILGIDLAKSVFQLCLLNDNHIIFNKKMTRSRLLDAVRQMESGTLIAMEACSTAHYWARTIENLGFKVCLIPPQHVKAFVKHHKNDANDALAICEAANRPGM

SEQ ID NO: 4635 - protein, 197 aa, Xenorhabdus sp.
MNTTTLIGIDLGKHSFHIHCQDQSGKALLRKKFTRTKLMEFLADCSPATVVMEACAGAHFMARRIVGLGHEAKLISPQFVRPFVKSNKNDFIDAEAICEAASRPSMRFVQPRTETQQGMRALHRVRDSLIRDKVKTTNQMQAFLLEFGISLPKGEAVIKRLSRVLAEHDIPDYLSRLLMRLHTHYLYLVEQITSLER

SEQ ID NO: 4636 - protein, 169 aa, Xenorhabdus sp.
QSLEVQVKALKAEGVRADRIFTDKVTGSSLDREGLQMLRLKIEEGDVILVKKLDRLGRDTADMIQLIKEFDERGVAIRFLDDGISTEGTMGKMVVTILSAVAQAERQRILERTNEGRLEAKAKGVKFGRKPTIDKAQVRHLHEQGIGATNISGQLKIARATVYKILATV

SEQ ID NO: 4637 - protein, 144 aa, Xenorhabdus sp.
SSAHTKWLCKYHIVFSPKYRRKVIFNNIRSSVGEILRDLCKYKGVEIIEGHLMPAHVHMLVSIPPKLSVSSFMGYLKGKSSLMIFDRHANLKYKFGNRKFWAEGFYVSTVGLNEATIQKYIREQEKSDLISDKLSSKEHVDPFK

SEQ ID NO: 4638 - protein, 89 aa, Xenorhabdus sp.
MSGDSADDGDWPKYRASPLKKLRPKSVTEAIALGTEVIICCEMDEQWSYVKSKKQPRWLFYVYDRTRRKVMKKHWQGNCMWSVSVIPHV

SEQ ID NO: 4639 - protein, 145 aa, Xenorhabdus sp.
SSAHTKWLCKYHIVFSPKYRRKVIFNNIRSSVGEILRDLCKYKGVEIIEGHLMPAHVHMLVSIPPKLSVSSFMGYLKGKSSLMIFDRHANLKYKFGNRKFWAEGFYVSTVGLNEATIQKYIREQEKSDLISDKLSSKEHVDPFKG

SEQ ID NO: 4640 - protein, 133 aa, Xenorhabdus sp.; identical to SEQ ID NO: 4631

SEQ ID NO: 4641 - protein, 135 aa, Xenorhabdus sp.
KYHIVFSPKYRRKVIFNNIRSSVGEILRDLCKYKGVEIIEGHLMPDHVHMLVSIPPKLSVSSFMGYLKGKSSLMIFDRHANLKYKFGNRKFWAEGFYVSTVGLNEATIQKYIREQEKSDLISDKLSSKEHVDPFK

SEQ ID NO: 4642 - protein, 131 aa, Xenorhabdus sp.
HLIINHLGEILALKITAGNTDDRKVVRELAKELIGSLYGDKGYLSQELANDLAQNGVTFITKKRSNIKASVLEDWDKIMLSRRFIIETVNGQLKNICQIEHSRHRSIKGFLLTVLTGLIAYCHKKKKPSLK

SEQ ID NO: 4643 - protein, 181 aa, Xenorhabdus sp.
SVALYYVSCQETNNDKELSWHILTSEPVTCKEDAHRILDYYEKRWLIEEFHKAWKSGGTRVEALRMQCKENLEKMVVILAFIAVRVHQLRYVGLNKSEAEKQSCETLLSPLAWKLLWTKQEKKKLPKTAPSVYWAYINLGKLAGWYDSKRNGRVGWERLWEGWFMLQTILDGYLLSKSLDL

SEQ ID NO: 4644 - protein, 133 aa, Xenorhabdus sp.; identical to SEQ ID NO: 4631

SEQ ID NO: 4645 - protein, 86 aa, Xenorhabdus sp.
KIDELGDPLLVLDKYVDFSALADTLDRIVPRIISPKGGRPPFPTEVMVRIIILKHFHNLSDEKMEYQLLDRMSWQRFCRLTDVINL

SEQ ID NO: 4646 - protein, 144 aa, Xenorhabdus sp.
SSAHTKWLCKYHIVFSSKYRRKVIFNNIRSSVGEILRDLCKYKGVEIIEGHLMPDHVHMLVSIPPKLSVSSFMGYLKGKSSLMIFDRHANLKYKFGNRKFWAEGFYVSTVGLNEATIQKYIREQEKSDLISDKLSSKEHVDPFK

SEQ ID NO: 4647 - protein, 139 aa, Xenorhabdus sp.
LALKGNQGEFYDDIKLFLDNQLAKDFTGVIHGTYRSTDGDHGRIEQRQLWLINDVNWLQKRHPQWHTLGGIAVVESWREEQGKTESYERRYYITSHRGASAEFLACAIRSHWHIENKLHWQLDVSFGEDTLARESASSP

SEQ ID NO: 4648 - protein, 145 aa, Xenorhabdus sp.
SSAHTKWLCKYHIVFSPKYRRKVIFNNIRSSVGEILRDLCKYKGVEIIEGHLMPDHVHMLVSIPPKLSVSSFMGYLKGKSSLMIFDRHANLKYKFGNRKFWAEGFYVSTVGLNEATIQKYIREQEKSDLISDKLSSKEHVDPFKG

SEQ ID NO: 4649 - protein, 145 aa, Xenorhabdus sp.; identical to SEQ ID NO: 4648

SEQ ID NO: 4650 - protein, 133 aa, Xenorhabdus sp.
RYGSHTVFQIEYHFVWVTKYRHKVLTGEVGLRVRELVRQTCEAFEIRIVEGVVSKDHVHILVSCPPSLAPSEIMRRIKGRTASKLFEEFAHLKKRYWGQHFWGRGYFCATVGQLTEEMIKAYLAHHFEPNPND

SEQ ID NO: 4651 - protein, 133 aa, Xenorhabdus sp.; identical to SEQ ID NO: 4628

SEQ ID NO: 4652 - protein, 145 aa, Xenorhabdus sp.; identical to SEQ ID NO: 4648

SEQ ID NO: 4653 - protein, 133 aa, Xenorhabdus sp.; identical to SEQ ID NO: 4650

SEQ ID NO: 4654 - protein, 177 aa, Xenorhabdus sp.
QSKKTLRHPNADAQARQAFVDRIGHYEQAMKPIVYLDESGFSQSMPRTHGYSAKGLRCFGTHDWQAKDRINVIGAILKKTFVTLSLFSGNINADVFHAWMTQDLLPSGAVIVMDNAPFHKRHDTLKAIADHGCLLEWLPPYSPDLNPIEPKWAEVKAIRRRERCSIDELFMTHVKYV

SEQ ID NO: 4655 - protein, 236 aa, Xenorhabdus sp.
CLVVKVRQDNRVINKSVFIALGINTEGHKELLGLWLAENEGAKFWLGVLTDLHNRGLKDIFIACVDGLKGFPEAINTVYPQTRVQMCIVHMIRNNLRYVSWKEAKAVVKDLKQIYQAPTEEMALQALDAFAEQWDERYPQISRSWQENWGNLSTFFAYPAEIRKVIYTTNAIESLNSVIRHAIKKRKIFPSDDSVKKVIWLAIQAASKKWTMPIQDWRLAMSRFMIEFGDRLDGHV

SEQ ID NO: 4656 - protein, 144 aa, Xenorhabdus sp.
SSAHTKWLCKYHIVFSSKYRRKVIFNNIRSSVGEILRDLCKYKGVEIIEGHLMPAHVHMLVSIPPKLSVSSFMGYLKGKSSLMIFDRHANLKYKFGNRKFWAEGFYVSTVGLNEATIQKYIREQEKSDLISDKLSSKEHVDPFK

SEQ ID NO: 4657 - protein, 133 aa, Xenorhabdus sp.; identical to SEQ ID NO: 4631

SEQ ID NO: 4658 - protein, 128 aa, Xenorhabdus sp.
SSAHTKWLCKYHIVFSSKYRRKVIFNNIRSSVGEILRDLCKYKGVEIIEGHLMPDHVHMLVSIPPKLSVSSFMGYLKGKSSLMIFDRHANLKYKFGNRKFWAEGFYVSTVGLNEATIQKYIREQEKSD

SEQ ID NO: 4659 - protein, 100 aa, Xenorhabdus sp.; identical to SEQ ID NO: 4621

SEQ ID NO: 4660 - protein, 103 aa, Xenorhabdus sp.
KKTFVTLSLFSGNINADVFHAWMTQDLLPKLPSGAVIVMDNAPFHKRHDTIKAIADHGCLLEWLPPYSPDLNPIEPKWAEVKAIRRRERCSIDELFMTHVKYV

SEQ ID NO: 4661 - protein, 100 aa, Xenorhabdus sp.
AEQWADETFSRANLGDSRRTKRLIKFTASLANHIGQSIVQSLKTPADIEAAYRFTRNQAINATSIAEAGFAATAEHAKSYDCLLALEDTTSLEFTPPAGG

SEQ ID NO: 4662 - protein, 145 aa, Xenorhabdus sp.; identical to SEQ ID NO: 4626

SEQ ID NO: 4663 - protein, 339 aa, Xenorhabdus sp.
MKCTPVGVDIAKHLIQVHFINEHTGEVVDKQLRSQDFMTFFSNREPCLIGMEACGGSQHWARELEKQGHKVRLMQGRFVKAFVMGNKNDVMDARAIWMAVQQPGKEIAVKTEEQQSVLVLHRSRRQLVKFRTAQINALHGTLLEFGETIHKGRAAMDRELPAALERMKTKLPPYLITVLEDQYNRLSELDSLIDGLEKQLISVAKQSETCQRLMEIPGVGPLIATAAVATMGETSAFKSGREFAAYVGLVPKQSGSGGKVRLLGISKRGDTYLRTLFIHGARAVALLAKEPSPWITELKKRRPTSVAIVAMANKLARTIWAIAAHDRKYEKNHVSIRPY

SEQ ID NO: 4664 - protein, 133 aa, Xenorhabdus sp.; identical to SEQ ID NO: 4631

SEQ ID NO: 4665 - protein, 886 aa, Xenorhabdus sp.
AKLCELIRYFPKGHSALRQLLFYLDRQRIVTPTYRKLQDMFSDAFAVEEARIKPILQSIPDYWREQLSSLIDHKDGLNQLTLLKADQKDFQYTAVKFEIEKAQSMEELYRFAEEFLPSLKISKNAIRYYADIVEQYAAYRLRRLGKYQQWLYALCFIFHRYQQITDNLIVTFLYHVRAIMDSAKAFAETEQLKHSSQVMVDFPKLAKFLKWFPTRSQNMTQEELNEMAYSILPKDQFSTLADFLAGNTFDKTAAKWQYYASASRLISLYLRPIVLAVPFSYYREDSHVVELIDLIKTHYTNGKSPNSLKIADDLGLTVPKHLQTYLKRKPEDENLDPYLFEFFIYQKMYHLINRGKLCCNASVSYCDINHDLINDLLVDDIEKIALEFGYSKLPVYCESRLDDAIEALDQAWASTTENIRLEQNAGFQIKESADGKHQWRLLYDSSEKLDDSFFRTLPKAEIADVVMFIGELTGMWHGFTHLKDRYTKRKKPAPLALNACILSEAFGFGTIKMSEMSDIDYSALRSTREDFVRIETLCAANDRVSNFINGLSIFKIWNLLDDKLLADADGQKFATTDSTIQSRYSKKHLGKGRGISLYTLIANHVAVTASNLGLNEYEGHCLYDMVYGNKTDIYIHSVTGDNHSLNKLNFVALDAIDVNYVPSIKNVREASESLYEANPIADMDGPLRPMGTIDEGLIRSQSRGIKRVLLSLVLQENTQNHLIRKLNSHTRYARLRAALYEYNRIFKSTHVLNLIDDMHLRKAIRTARNRTESYHQLQSIIRKIYNNVFKGRKITDNRVSAHAARLVANCIVAYNAMILNRVYKKMVFEGVPEEILEKFARISPIAWQHLFFTGRYSFKKASKTSIDVAALAELLEQHLKQAFWKS

SEQ ID NO: 4666 - protein, 133 aa, Xenorhabdus sp.; identical to SEQ ID NO: 4631

SEQ ID NO: 4667 - protein, 126 aa, Xenorhabdus sp.
MDYRYGSHTVFQIEYHFVWVTKYRRKVLTGEVGLRVRELVRQTCEAFEIRIVEGVVSKDHVHILVSCPPSLAPSEIMRRIKGRTASKLFEEFAHLKKRYWGQHFWGRGYLCATVGQLTEEMIKAYL

SEQ ID NO: 4668 - protein, 84 aa, Xenorhabdus sp.
MKCTPVGVDIAKHLIQVHFINEHTGEVVDKQLRSQDFLTFFSNREPCLIGMEACGGSQHWARELEKQGHKVRLMQGRFVKAFVM

SEQ ID NO: 4669 - protein, 133 aa, Xenorhabdus sp.; identical to SEQ ID NO: 4628

SEQ ID NO: 4670 - protein, 133 aa, Xenorhabdus sp.
RYGSHTVFQIEYHFVWVTKYRHKVLIGEVGLRVRELVRQTCEAFEIRIVEGVVSKDHVHILVSCPPSLAPSEIMRRIKGRTASKLFEEFAHLKKRYWGQHFWGRGYFCATVGQLPEKMIKAYLAHHFEPNPND

SEQ ID NO: 4671 - protein, 133 aa, Xenorhabdus sp.; identical to SEQ ID NO: 4650

SEQ ID NO: 4672 - protein, 145 aa, Xenorhabdus sp.; identical to SEQ ID NO: 4626

SEQ ID NO: 4673 - protein, 133 aa, Xenorhabdus sp.; identical to SEQ ID NO: 4631

SEQ ID NO: 4674 - protein, 133 aa, Xenorhabdus sp.; identical to SEQ ID NO: 4631

SEQ ID NO: 4675 - protein, 145 aa, Xenorhabdus sp.; identical to SEQ ID NO: 4626

SEQ ID NO: 4676 - protein, 133 aa, Xenorhabdus sp.; identical to SEQ ID NO: 4650

SEQ ID NO: 4677 - protein, 145 aa, Xenorhabdus sp.; identical to SEQ ID NO: 4639

SEQ ID NO: 4678 - protein, 133 aa, Xenorhabdus sp.; identical to SEQ ID NO: 4628

SEQ ID NO: 4679 - protein, 41 aa, Xenorhabdus sp.
VAKQKFKITNWSTYNKALINRGSLTFWLDDGAIQAWYESAT

SEQ ID NO: 4680 - protein, 133 aa, Xenorhabdus sp.; identical to SEQ ID NO: 4628

SEQ ID NO: 4681 - protein, 127 aa, Xenorhabdus sp.
DYRYGSHTVFQIEYHFVWVTKYRHKVLTGEVGLRVRELVRQTCEAFEIRIVEGVVSKDHVHILVSCPPSLAPSEIMRRIKGRTASKLFEEFAHLKKRYWGQHFWGRGYFCATVGQLTEEMIKAYLAH

SEQ ID NO: 4682 - protein, 145 aa, Xenorhabdus sp.; identical to SEQ ID NO: 4639

SEQ ID NO: 4683 - protein, 112 aa, Xenorhabdus sp.
RDTADMIQLIKEFDERGVAIRFLDDGISTEGTMGKMVVTILSAVAQAERQRILERTNEGRLEAKAKGVKFGRKPTIDKAQVRHLHEQGIGATNISRQLKIARATVYKILATV

SEQ ID NO: 4684 - protein, 145 aa, Xenorhabdus sp.; identical to SEQ ID NO: 4648

SEQ ID NO: 4685 - protein, 145 aa, Xenorhabdus sp.; identical to SEQ ID NO: 4648

SEQ ID NO: 4686 - protein, 189 aa, Xenorhabdus sp.
MAKIGYARVSSTGQSLDIQLEKLTQADCKRIYQEKRSGRTAHRPQFQACMNYLRDGDTLVVTKLDRLARSVTHLSQIATRFQEEDIDLVVLDQNIDTRTSAGRLMFNMLASIAEFENDLRSERQAEGIAKAIEKGVKFGRPAKLNDTMRNDIYQRRQSGVTIGTLAKDFKLGEATIYRVLNAFKNRDNA

SEQ ID NO: 4687 - protein, 169 aa, Xenorhabdus sp.
QSLEVQVKALKAEGVRADRIFTDKVTGSSLDREGLQMLRLKIEEGDVILVKKLDRLGRDTADMIQLIKEFDERGVAIRFLDDGISTEGTMGKMVVTILSAVAQAERQRILERTNEGRLEAKAKGVKFGRKPTIDKAQVRHLHEQGIGATNISRQLKIARATVYKILATV

SEQ ID NO: 4688 - protein, 402 aa, Xenorhabdus sp.
MDEKQLQALATELAKNLKTPEDLSQLSRFLKKLTVETALQAELAAHLGHEKHHPKTGSNTRNGYSAKTLLTEEGEFALQIPRDRESTFEPQIIRKNQTRITGMDSQILALYARGMTTRDIASAFKELYDAEVSPSLIAKVTDAVKEQVLEWQSRPLDSLYPIVYLDCLVVKVRQDNRVINKSVFIALGINTEGHKELLGLWLAENEGAKFWLGVLTDLHNRGLKDIFIACVDGLKGFPEAINTVYPQTRVQMCIVHMIRNNLRYVSWKEAKAVVKDLKQIYQAPTEEMALQALDAFAEQWDERYPQISRSWQENWGNLSTFFAYPAEIRKVIYTTNAIESLNSVIRHAIKKRKIFPSDDSVKKVIWLAIQAASKKWTMPIQDWRLAMSRFMIEFGDRLDGHV

SEQ ID NO: 4689 - protein, 182 aa, Xenorhabdus sp.
MRTFGYARVSTSQQSLEVQVKALKAEGVRADRIFTDKVTGSSLDREGLQMLRLKIEEGDVILVKKLDRLGRDTADMIQLIKEFDERGVAIRFLDDGISTEGTMGKMVVTILSAVAQAERQRILERTNEGRLEAKAKGVKFGRKPTIDKAQVRHLHEQGIGATNISRQLKIARATVYKILATV

SEQ ID NO: 4690 - protein, 211 aa, Xenorhabdus sp.
LYVITPSEEYRPLDALIAGRARMDVIEQHWDEVLRLKASIGAGLVPPSVILKKLAASPRQNRLNQALREMGRIERSIFICDWLLDTRLRRRSHAILNKGESRHALARAIFLHQLGELRNRAAEAMAYRASGLNLVVNAIVLWNTVYLSRAVDYVRSQGIIIPEELLSSVAPLPWGHISLTGDYLWNEIDRPLERYKPVRTKRFNPKNFTFP

SEQ ID NO: 4691 - protein, 268 aa, Xenorhabdus sp.
DIAINEAYEYLGKTHEFYIKIFDRNSLDNQGLKLVATVHYGKNYLNAFWSKKQMVLGDGDGQFFNRFTSAIDVVAHELTHGVIQNEVNLYYAYQSGALNESISDAFGIMVKQYANNQKADESDWLLGKGILGPRFNPENKPDIALRSFIRPGTAFSNDRQVAHMDQYEELPITLDNGGVHIYSGIPNKAFYLLAIALGGYSWERAGKIWYETLLDNRLSSYATFDEFATLTIKSAERLFGKNIAHITRECWKQVGVLLPKKTAAKILI

SEQ ID NO: 4692 - protein, 477 aa, Xenorhabdus sp.
LYRHLVGLPLPYFKQRQTGQIIARVREMAQIRQFLTGSTLMLLLDLIFIVLFLGVMFHYSSLLTWIVTGSLVLYFLLWVTVGPIIRHKVEAEYEADAQATSFLTEAVTGIETIKTTATEKRFLHQWQAVLSRQLIQRFSAQKSGLAAGQGIALIQKIVAALLLWWGVKSVLAGELSPGELIAFNMLAGHVTQPILRLAQVWQDFQHTLIALRRVGDILDEPMENSKQGLVSSPELAGQIEFKNIRFRYHEDTPEVLANLSLSISAGEFIGITGPSGSGKSTLTRLLQRLYIPQHGQVLVDGMDLAIADPVSLRRNMSVVLQESILFSGSIADNIRLCKPNATDEELYRAAALAGAIDFINQFPHKFAHPVGEKGGNLSGGQRQRIALARALLNDPKILILDEATSALDYESEAAIMSNMDEIRQNRTIISIAHRLNTLRHADKIFVLDQGRIIESGSHADLLQQHGLYAQLWHQQTE

SEQ ID NO: 4693 - protein, 1599 aa, Xenorhabdus sp.
FKRTPTSGVGFLYEQYQITKKLEAQAKGAPVNIPLASRRPDISETIIDNDAYSKEVPVLKLNNEVLKATIQKYINETKPVGTTVDDVLAETYYPFGLPYERYQHQINYVLDKKRETHTDKSLTEKNESLGDIIRTCDIAYPWFKQPGLHSDKTNDAQMLDTFMGPAQAELLLEKPFFPTSQKSVLNEYIASPRTALISKTSDRQKDFYKKCYGVETSADLVNTKDFCIKVGISHAELESLLSIENFMPVRSDYVSNNVAAPASPTVFGSVFINAGNSDFITIETVTSGTGDDKSTHHILTHVTDDSFDRMQRIIRLSRWLNLSFEEVDQLLMALLRAENPTEQNIALLWPTHNTLRGLGLFQRFKKKYDLSAAKFAAIIDTVSVYARGDSTSQLDTLFSLENQFDKQYIIDNSEFYIVGRTETEQKKIALLCAALGIDNDTFIFIGRLIAKTLNSSNAQADDFIPEKLTWSIEVISAFYRVVTFSRCVGVEPVTALALLSIINDGGQQFLTKLCRVEVSGNQYSSVTDTFNILDNLADAIEWCQSNQIDIPWLYHVLLPVSKMPVATDRELNLVKEMNAKVNPTLITEKSFSDGGVLPPEGSNGGTKTWMQTLSDFIDDGSSKGNIPGISGLVKDLGYTDPLSYQSMLATELAKKVSEEDKTRDPDIIYKLSTIIMSAKANQEALVWETFSNTFSLDADQAREVLFWSDGNFYQVLKHVIRIASSSEARISIVEGDAFLSLVNRISKRAEICQAFNLSAGFLQSFLKYPQRYLFKQYELSNPNAFRAKDNVVEELDFITLYSLACYATTLKALGREETLILNYLQLASAIPDLNELSESELQLYREDCALKVSEFTDFAVKEIIDLFDSLYQMNGTIVTTMEQLAFMIRLREAKINIKVGVSELIALSHLTIFSDKMSYREAAEAALSSLGTTGNETTAISQLGELGQTDTSFITVDKEALVAIDKSKYPNALEQVAVFTAKLLDPYGNPRAGIQIRWQTTLGTLRAATTRTDENGVSQVSLLGGSLIGEAKVTAIYSLERELVAPPVMLTYDQNNLVMSAVGDIVGRQIKANGKDKALFTVSLKDIYGNVTLDEKVSWNTDKGRLTQQLTSINEKGESSVYLTANNVIGNAKIVCEALNEKVSFYPVLINDVPYVEYVKVLAVDNLTPGYFILEKEYPVECRLLRVNGEPLVNEPVEFGFLDEESGIFNPVTGRTDKEGKFSSSLTFTKVGSCVITVKGEDTELKQSESVNVIPPVKIVEQSQSSEAIYTPDQSSVDCSVTIEPKVANYPIQWLANNIPIMTTVTDSDGTAKFTFTPADYGKHQLQAKTQDDDAVIFTIKKERRYVVEMFTTDEEAQQDIPDTLRTKIYDNNTGEYFDKFFINFKSNPMVGLQFHDKLKGDVNNLSYIVISCLLDSTPAEQFNINIPQKYYDSYQDIDDNGKGSISIDVKNVDWKNVNTKNITLSLQLQNGEIITETFSVAIFINLKGVYENVYIHAYSRYPFTQEEWRCNDDYWDNMVKIGTMRVPVSGPPTSERYGNLSYYGGGGWPASEFKILAQGFGWELKIGGLKNLGPDEYCHSALYTKIALTDPSTIPIEN

SEQ ID NO: 4694 - protein, 1527 aa, Xenorhabdus sp.
MPNSLSVIKQLDESYRDALLDYNLGQVFSNDKKLKIFNIDTVDELYEYLLVDPKMNVEFKTTRVAHLISSLLQRNHAVYNGMEPGFSNNFSKQELEQWNNISSDMSIWASNKLLQNYPENYIDPNLRLNKTHLFSNFVNEINQNRISEESVKKSVMSYLSQMEELCNISTVSSYMDNATVTDANFWFLGQNPLTPNDLYWRKADNIIYEQDKNNWATNPAGWSEWKKINLAAQSIFCSRLAYFNNRLYLFYFSSTPEQSDSQEIKNKRYTTRLETVYLGLNDQWSEPTVLKTYTGMEVPNGNYEQSGIVLRGRYDKDRSSEVLDVIYKIEKNDIQALSLNGWMGSKAISDLSNNPLYKDIYGLMSSRKLQLYGFIYEATDKNMFNLSIIPLPDDPWSNNENYKCRARLYDPKLEFKKEKVSGNDAYVPYVSVSTDYEDDFSYRAAKEMHYQANPWLSIFGVMRVDLCFQRRTQDGRYIADITPYSIWGIIPFDIKIIVNNKVIFDNENLLLVNGSRYALENTDAVNEAGKYLSNLGTNIPAGAIQISLSEIVSDFVLTSFIPETVYQDATVVSYFFPSESGADRTNQKKKMGTITARGRHEFSSPFTFSLRKKKGDGDLLPIIGRYHMESYVTPGRDYDAGNGNTPLPSKPNHYAFQLEITQAQALQLPDIEYAADGGQYLALSAEGNHGLTHIRLNTVFASELYSRASISLENLFSWAAQNILEAIPPAASNLPKTLDFHGANGRYFWEIFFHIPHAVANRLHQEFNYRDAENWYHYIFNPQIRVHEGEDNANKTPYWRVRPLLEPGSYAWEQETRRVADPNAICYSTPERYKKAIFMEYARNILAQGDALYRRLTRDALTEARVHYSRVASLLGPRPDVLVASRWTPNTLETLSTDATVLDGSLERFLPEMLPEMNKVRNGHWKALNDPKAFRTPVNPDLITLWDTLQQRLDTLHNNLTIDGKPMLLEMYAAPVNPRDLLRAQNSASGLSQRAVSALAPILPYRFRALLPRVQSAVETLTRFGDLVRQYREQKERALQEELVQSQMDELSAFAVQLQEAALEQQQAAIDALAESQKSVQQRQKYYAALYDENISAAESQSMDLLTESSTHEIAASSFDTIGAVADLAPNVFGFATGGMNFGAPLRATASGLRAKSISLQMSADRLSQSEQYRRRREEWRFMRDQSSAEIESIQKQIDAGKLAKEMIQIQMNQAQKAQEHAKTHYQFLLTRTTGSGLYQWLVSQMSTFYFQAYDVVTSLCLCAEACWQYEMGDYDTRFIQPNVWLDNYFGLTAGEALKLQLLNMESAHLKRHERRLEIVKTVSLKQLLKNATKNNLSSWDKMLESGQLDFELNASLFDHDYPGHYLRQIVNVSVTMPGLISPYQNVKAMLTQVTSHTLLKPDVSALDYLYRLTTAKPTSLLSNPRVSQSIALSSGFDDHGQFMLDFGDERYLPFEGTGAMSQWRLSFPLHDQEEQQTFLNSLDDIIIHLRYTALQGNSSFTQAINQRLDAQEKEIFSDETEEAEAR

SEQ ID NO: 4695 - protein, 975 aa, Xenorhabdus sp.
VIYQKLDKTWSTPIVLKTLSDRPNTELELNAIVLFGNKNKQGKDDSIEVIYELNISTQKVRKKLLLNAKLAFLQEEKSLNGTEEEKYAKFYKSKINVCNSAYNRAPNSIFPNIIQENGGEYLALQDQKLPDLTHIRLNTTFAAQLVARASLSLDNLLSWEAQNTREVAPPSNAVGVPNTLDFHGANGRYFWEIFFHIPHAVANRLHQEFSYRDAENWYHYIFNPQIRVHEGEDNANKTPYWRVCPLLEPGSYVWEQEAGRVADPDAICYSTPERYKKAIFMEYARNILAQGDALYRRLTRDALTEARIHYSRVTALLGPRPDVLVASRWTPKTLEALSTDATILDGSLARFLPEMLPEVSKVRNEHWKVLDDPKAFRAPVNPDLIALWDTLQQRLDTLHNNLTIDGKPMLLEMYAAPVNPRDLLRAQSSASGLSQRAVSALAPILPYRFRALLPRVQSAVETLTRFGDLVRQYREQKEQALQEELVQSQMDELSAFAVQLQEIALEQQQATIDTLISSKKVVTERQAYYRKLKDDDISSAERDSMDKRKETIPYEQASSGMESAASIADLVPNLFGTSVGGSVWGGPARALGWAQRISASGKRVMSYVTSESEQYRRRREEWQFQYDQSVAESEMLDEQIKSAQNAKRMVQVQLDQVRKEQEHAKVRYQLLLTRTTGSALYQWLISQMSTFYFQAYDAVTSLCLSVEACWRYEMGDYEARFIQPNVWFDNYFGLTAGEALKLQLLNMESTYLKRHDRRLEIVKTVSLKQWMENTIDSLTWDEVVEKIRETGQFDFSLSPLDFDRDYPGHYLRQIINISINMPLLLGPYEEIKATLTQTSSETLLSPDMAALKYYYPEQDGDIPIKPASILSNPRVSQCIVISNQENKTGVLYTNINDERYLPFEGTGAISSWRLDFPRADKSQQSRLINALKDIVIEFRYTAQTGNTAFTNEVSGLVRESNKRLRQHKWQGSDLM

SEQ ID NO: 4696 - protein, 1482 aa, Xenorhabdus sp.
MQNSQDITITAPSLPKGGGTLRGMGETFTGGGPDGMASLSLPLPISSGRGTAPALSLTYSSGSGNGAFGMGWQSAPMAVSLRTAQGVPHYEGNDTFLCPMGEVMNVAPNERGEPDIRTTNQLQGITLGESWQVTRYQPRLVQDFSWLEYWQPEQGNTQKPFWIMFSPNGQVHLFGKNAHARVANPADDNKIAQWLLEETVTPTGEHIYYQYRAEDDAGCDEHEKEQHPLSGAQRYLMQVHYGNITPQASLFALDKALPANDQWLFHLVFDYGERAGSLYEVPAFQAGSASWTARPDCFSRFEYGFEIRTRRLCQQVLMFHRLNALAGKTEASEVPALVSRLMLSYDFNHSISTLVSARQVAHENDGTPVTLPPLELDYQRLDTASLPAWQPMPQLDKFNHLQPYQFVDLYGEGLPGILYQDAPHAWWYRSPVRDTQVEEPDTVAYGEIKPLPQIPAQQNNASLMDLNGDGKLDWVVTSAGVNGYHTLAPDGQWSPFIPLSALPVEYFHPQAQLADLTGAGLADLVMIGPRSVRLYANQPTGWKKSNTVIQSDGMTLPIPGADARKLVAFADMLGSGQQHLAEIAADGVTCWPNLGHGRFGQPIRLAGLTVSAKNFNPDQVYLADIDGSGTTDILYVHSTYLELFINESGNQFAAPVRINLPENVRFDRTCQLHIADTQGLGVSSIILTVPHMTVQHWRLDMTEYKPGLLNIINNNMGAETTLFYRSSAQFWLDEKHQAESAGRAVTSYLPFPIHVLWRTEVRDEITGNRLTSEQDYAHGAWDGREREFRGFGRVRQKDTDKLAQATHSSVTDPLSPAITISWFATGVPAVDTLLANEFWHGDKQAFPPFTCRFTHFDPDKEQDVTLVPSTEEAYWLHRALKGQPLHSEVYGDDGTAQASIPYTVMDSRPQVRLIAGLPGYSPAAWTSVIEQRTWQYERVAEDPQCHQQVVLNSDRYGFPRETVEIAYPRRPKPAVSPYPDTLPETLFDSSYDDQQQQLRLTRQRQRYHHLTDTEYQGLGLTDVVRSDAWAYPAERVPREGFTVENLLAANSLIAPGTPLTYLGHQRVAYIGPGENPTRQALVAYTETAVFDELALQAFNGTLAPEALEKKLIEAGYLCVPRPFNTGAESAVWVARQGYTDYGGAEAFYRPLAQRATVQVGKNVIHWDTHYCAVIRMQDAAGLYTNATYDYRFLTPVQITDANDNQQHITLNALGQVSSSRFWGTEAGTPQGYTPPEKRPFTPPTSVEEALGLNPHLPIANCIVYAPLSWMPLAHTYQEYIAGFTRQALLDAGVVTEDKRVCALGFRRWVQRQGIVLNGQALADSREPVHVLTLATDRYDTYPEQQLRKSVTYSDGFGRLLQSAVYHAPGEAWQRAADGSLMTDETGKPIVAHTTTRWAVSGRTEYDGKGQPVGTYQPFFLDAWQYLRDDSARQDLYADTYRYDPLGREYQVRTAKGYLRQNQLTPWFVVNEDENDTGSQLTQ

SEQ ID NO: 4697 - protein, 986 aa, Xenorhabdus sp.
MTLNRGNNLHQNTPEVAVLDNRWLTIRELRYHRHPDTPTKTDERITRHRFTLAGQLAHSIDPRLFDLQQTDNTVNPNIVYETALTGEAVRIRSVDAGNTLMLNDITGRPVLAINATGVTRTWQYEHETLPGRPLSITEQPAGETARITERFVWAGNSQAEKNNNLAGECVRHYDTAGLNQTDSIALNGVPLSVTRRLLPDGTDADWQGGNESAWNDRLVPESFTTLSTVDATGALLTCTDAMGNVQRLAYDVAGLLTGSWLRLAGGTEQVIVKSLTYSAAGQKLREEHGNGVVTTYTYEPETQRLVGIKTERPQGHAQGTKVLQDLRYEYDPVGNVLRITNDAETTRFWRNQKVVPENTYIYDSLYQLVSATGREMANTGRQGSSLISVTVPLPADSTAYTNYTRIYAYDTGGNLTQMRHSAPATNNSYTTDITVSNRSNRGVLSTLTQTPSEVDALFTAGGQQNTLQPGQTLSWTPRNELLKVTPVSRNGNADDSESYRYDGGSQRILKVSTQQTRNSTQAQRVVYLPELELRTTRNGETEKESQQVICMGESGRAQVRVLHWDSGKPADIVNDQVRYSYDNLTGSSQLELDSDGNVISMEEYYPYGDTAVWTARSQTEADYKTIRYSGKERDATGLYYYGYRYYQPWAGRWLSADPAGTVDGLNLFRMVRNNPVNYYDEQSTVSFPIDKFNLMTISSAGTHGNRKNEVDRLYGKKGVPMIPQTRAGNSNKKPPEPRPALSSEHTILHTVSAHGLGRGDNIKATNALKKAVNNIEKFGHAYQEYDEAHRKHIGSNNGRFYRNTEIGVNPMTEAEYLSKETVTNNYRTYADTQRSLLLNNDVSSAIQINQMAYFSDSAELANLVKNNSESQKTNDSFYYSVSVKDTYYYLKNDSEVASIDVTNTNKIEMILSRLMGVLGRAPSNKELRDVLGKYNLTPPKNLFSLLNDPSFKNRSIFDPSVTAYISKNAKNKAKKQARKNAAKSLP

SEQ ID NO: 4698 - protein, 2384 aa, Xenorhabdus sp.
MANNINSQISYKTLFNDNQDLYCFPGLPEANDGPLAYLVELYQQIQMFEKDADKESARFLSQRRADIEKLLLDSTNLNQTSSLLPLVIEALAEKVKNHINNNQPLTHSLADIHYPLSLPFHFPLKQTTTVLAKKEIPLLDLIQRADSKYPNFIDDNLSADSLQTAMMISSTLAPKLQALLLETSQSSQKDFFEKYYGLKGDTAKAAGSLERLTVFTQQTGLTSQEAELLFAVNGIAEETKTHSIVTYSGNVTKPDNADKQFPSGANYAASYINAGKAPALYLEKTKDKDTAKDVIRIKGASNDNFDRIQRFLHIQKALKLSYEELDLLLVTASKAEKQTEFLITEATLRTLGVFLHFQQEYNVSAEQFAAFIGQVTPYSLENKLSFFDQLFNAPGLSQQASSSFVLVLDDKEFDPAATEGIDALTVNQLCRGLNIDDATCQILLSFVMQAQNLSKPKRSLDVVSALYRLVALPRLLGMSVKESLGLLLLLNRDNPNYLQQLAGIPVLANDAKAIDILDILIAVMNAAQWIRQHKLSPLSLNLLLIPYQSGGNVTADIENIDWIKKIRSIIPSANNALLSEDKIASAMQGFQAKNTSVIWMTALAKLVDTQFGIVLDSVISTNDGGEKALFNEVNKILKDLAQEAAWKQQGDIWTQNLVTLLINAFVAQQDLIINAVNHVFDIDNTLSLPLLRWTNNKQADFLRNTIALSRNLGDQQHKDKAVAAWYDLSRYSTICNIFKLTEKSIETLIDHPDWFKLQKDGKLRALDLTFLHRLSRYSDWLNLLPENKTEDDVIYYLRQANQIGQNSPATDVWSVEQAAANLAELIGWSDKEILRVTQYFTPKVAQNIVGISNVMRLKALAEKSEISVQPLLDAAKLSTASGYDHWHQVSSALFAAINPEDQSQPEGLLNELWRDALVDYLLRRWAPSDDSLSDIVTIEDLSNYFLTDIQVAAEVDTSRVAFAIASLQRYLFRLFSHLETGYDAIPITDERIEYWNRYLSQYSHWQVWQRQRNFPENFIDPTRRLRKTKAFNDLENDLGQSRLNNDMLQTAILRYLTEFERISNLQLISGYIDGTDPTSDRYHFIGKNNSEPVEYYWRTLDISLRDSNNIISPLAWSEWEKITLSLSGTLLAIRPIVISGRQYAIWVEREATPLMGADQKPTDYRAINVKFTFKQSNGEWSAPNELFRLDGTDANGEYPTKDGKRIPDNENHYLKDEKYKPALIAMVDVQREEDPWMGVLLYDTKEKDSSTWVKNKDYYLELRDLLLVDKKTLDDERKIVETWYKLFNNPDTLQHHYAGTEKFVTVKEIETKTKHNFFNLKPFRSPILTLDVRLDPTKTKLLLMGKNSLIKFDTNNQAASVNSNKLPTKELQWVINTDDIHIEAQISASDTGLKTFNFQWKGQNIPTEVFTISYGETKLFQLLPNEWKENKIIKSCDLSWVSGKVFQQSIQWDAKNDKKLSISIEGNNTSIASKQYQTKNEKFAKSFFVMGTYPQEKSLFGQEVYLNGQASTGEIQFSLKPNTKKYYFILGSIFMLDQNNPEDTSRFVENVYEVTIGESDKIPSITLQRSKQQAQYLDIKTLGFNSTAIRLNTLFGKQLVARATQSIERVLAWDSQSLPEPALDDKSSLTKVDFNGANGQYFWELFFHLPYLVSARLGDEQRFYDSRRWFINYLFDPYGGIRMWNSRPIIESGSNLPSSFNEIDPDTVAYSQPVYYQKSLFHYLIKLWMQEGDYLYRQLTRDSLNEAGLLYQQAQQLLGALPEGIDATRWHPVTLDKIKTSFKPNVRAIDSLFISPFNTQLIELQQTLKNRLYNLRHGLTIDGKASSLSLYASAANPDNLTQRNTGYATSTLSNMQQQIPPYRFPIMLKRACDAVKQLTEMGHRLLQATESEVNAEQEVLEQSQLIRLSEFAIELQQEAVQMTQMGKATLEESKKMAQERYDHYHNLYEENLSSLEISAISMKTMSEVAKLAAAPFYVTGAALEVVPNIFGMAMGGAKYSAPVTTAAIIAQLTAEGLDIAAERLQDGADYQRRRQDWEIEYKQAQSEINIIEMQLKEQDLLIKSAQIALKEAQAQQSTARELYEFMTTGFLIVPTYQWLMGRLAALYAPAYDAVLSMCLMAESSWRYEVGDYKRQGFIKTTAWNDSYRGLLAGESLQLDLLQMENTWLQRNERRLNIKKTVSLSSLLTSGGLRKQIDNKQSISFTLNSKLFDDNYPGHYLRQIKRISVSISLDTLNLGSVLSSEISAILTQTSSSTLTHPDMEGVNWLYDPNRKAGNSKNVVNNLRAQQQIALSSLSEDDGSVAKENWLYTLMFDDDRYLPFEGTGAISTWTLEFPDQDVIDNIFYYPGLVPVWRLKDINIHIHYTAVDGGKPFAKAVKDKINK

SEQ ID NO: 4699 - protein, 2329 aa, Xenorhabdus sp.
MIYMSKDFEELLNTLIDQQIKAAGRQTEWFDMDADARADYIKQVNERLQEMQQSTLSVLAAQHFQMQENPVSIEDHLQTLERSRQELDKRPNTPAREAYKLQLERDIRIYRTQQSAITHFDNARKKALNILSDALPLDAETLRKNAADKQAQLDTEIMSQEEFLKPLLEQQLTIQEKADPELNSKDVKRILEKLSSKYVKHFSNLQAYKYVKTRYNEFLKATPTEEVEALNKLTKIPQTSDNLPVNVSLLMMEERPGYIRMSVALVDTSPDGRFKDFFMRDGRLVVPEGRVFNFSFGTPARSLAWQQQYRLKYEPSLRSPTYAPIRSVLVKIKFVEKFFANYLVSENSEREGLKEHFLDNDRKILLSNVDRKVPNQIGIKVSSRSDKFPLASTLSDLINQNADITSFRTTSLEDFRNNSYDPDRDGLFTHIHELERSVGFADRQYLLEMPQGETYLSATPFLKISVEGDKIDSKHLTQTQTAELYQYNAAFFEKLDLLRDYGAEASHLFEDSRERNVFEQQLVRLLERNHITPAAVLESKNFNAKTRDIKGNNLNKMLWEKEFATSVWENIENDPLLFKLANKLNTLVFSSKMVDKILENNYVQSDIAQSKELLAQQYEQWRIQAIEEETQRINQQHPNNPKKQDFNHTEVERSVNKKLLALLLAGPESLESLESLESNEVQQDLTAEKSREALLSNKGRSLRKQALFHVLRPVADSYSKRAVPINPHAELMPENGENKVIINNRLNQPDPYLLLNTRPEERVYHDGSYLIKDDKYRSYNQFRPDPENKATRYMNDLDTPFIGGISGTTQTVSNVLPELFDGTLSVKEYWNFQMANAAFMIHNGYHSFFETFYVAARYEPEGKGSIGKDMLQMFDKYRDIGKEKTLQDELYVGVIDLINKGLPESEKFHLPHFGRYFDPENSISEKVRTVTPGKSVPKRDMVNPPLENNPDNAQIDIRLLAMLNRAEDFQQAMEQLYSKNALSAEEWLPVLGSLREDESRPGSYSLWFTNRVRSELPPRIFATDDQRIMDFIHSYDKELETVRKTHEYTKGKLTQRTGILEADAVHGLNTAFMVKTLIPWFADRNRTTVSSDKVPNTLETALQVHTYVNLAQMAHGALEDGAKLASLYRAVASEGRGVTSSLFSSLSHASTGIGVGLNIASVILDSLELAHAQNEPQKAVYGTQLAFDSAGLVTTGVGIGAGILGAPIVAGFASSLAVPLAGLGIGFTALAEAFGRVATDARAVGNYFADLEAAYQRGGYRQAEKVAQDGSRYTVMEPIPGAVIRQLDLRHGNLTFDSQYLYRNDPTYSWGSGRSNYFGWWPGRPANTDKKQAINIREGIGYKQAQIDFHFSPRSRDILILPVTMKSYINYEYMILPFVTARNDRGFDVLRRLEEDGRFDFDFYAFPSERVVRRIKPEFVETPVDIILDDEDRDIVIPQLPKDIHGILSYWLTGGKGKYRISLQEGVSLSLQGNDTATHWVLDARHIHSDDNPSFNKEDNRQLHIGNIKITLPETSVNISLINNAGVFSVKQDEKNQQWQIKEIETNAERFNSLQALHDHLRQLSNSDHHNRPYVVVENYRHSPQESRPVGRAFYETGRDRMIYTNVPDAADFLNNVELASVKGDKAWFYRDTTLWQVDIVSGEVLRQYLPIMFPESDQGKISSHVMQSNDQLWFVVEQQRDENLISYTYQVEEEALKLVAVDGNTTMLATLDEVSKKISLPVLLGSNDGEFNGLLAPQAATQRLTVELCVPERQVKSSPAEVISLSGKVAGVDRHYWLQTDGKQLQNVVRMNRINPDQEDADILAELKKKNPDLLTLTEDFTRVFTTAGDKPGYYFYSHQRHSLYFQQDNGLSNTPASKVSVDDIRVSIVNKQLVALSSSGKLWLADDQGSIRLIGVTVDWLLQPHQPGLTAALRQLARDTPDKFSTLLLLGLQDRDGKPVSAWYDSKADLVVQGRVGLNTEHTLVYLGLAEAEDGRQAWIFDTDNHQLYRQPLSTETDLKLSEKRVLSGEPAAAKPWLRTSHQYSSVVRQGNTLRLETPDGAVLLLSADAKMTDRPVLIAWHVQDRSDSQIASAIEALSNGAELSQAVRLFSEHGYPAWYLPKEKKTLRSAGILNSDHVLHYLGQVAGQEASYVHDQTTGDLWQISEGESGSARVVGNYRFVNRTPERLVLQVGQVPPGTTIHLPQLADIDRLAITGRSEKLYYWFSNPEVLAHYQHITIDDRGQDSIIRFSDTGIANLSRQRSDQDLVLLHQAAEDTSICIVNIEQAAQRDMRFEITLKRMKIINLLRRMANLMELNSDVSCFALVSEEGELRIKPAECTETLESF

SEQ ID NO: 4700 - protein, 129 aa, Xenorhabdus sp.
SRWGRESHDSAAKISLNLSAINLAGDKVIRSEMYRRRQEWEIQRDSAQREINQIAARLAGMSIRRQVAVMLVNSLQTQHQHTCEQLELLQRKFTYRELYNWMRGKLNAICYQFFDITQSFCLMAQERGY

SEQ ID NO: 4701 - protein, 1485 aa, Xenorhabdus sp.
MQGSTPLKLEIPSLPSGGGSLRGMGEALNAVGAEGGALFSLPLPVSVGRGLVPVLSLNYSSTAGNGSFGMGWQCGAGFISLRTAKGVPHYTGQEEYLGPDGEVLSIVPDSQGQPEQRTATSLLGTVLTQPYIVTRYQSRVAEKIVRLEHWQPQQRHEAKTSFWVLFTADGLVHLFGKHHHARIADPQDETKIARWLMEETVTHTGEHIYYHYRAEDALDCDENELAQHSGVTAQRYLAKVSYGNTQPETAFFAMKSGIPADNDWLFHLIFDYGERSSSLNAVPEFNVSEKWRCRPDSFSRYEYGFEIRTRRLCRQILMFHQLKALAGENVAEETPALVSRLILDYDLNNKVSLLQTARRLAHETDGTPVMMSPLEMDYQRVNHGVNLNWQSMPQLEKMNPLQPYQLVDLYGEGISGVLYQDVQKAWWYRAPIRDITAEGTNVVTYEDAKPLPHIPAQQESAMLLDINGDGRLDWVITATGLRGYHTMSPEGEWTPFIPLSAVPMKYFHPQAKLADIDGAGLPDLALIGPNSVRVWSNNRAGWDRAQDVIHLSDMPLPVPGRNERHLVAFSDMTGSGQSHLVEVTANSVRYWPNLGHGKFGEPLIMTGFQISRETFNPDRLYMVDMDGSGTTDFIYARNTYLEFYANESGNRFAEPQRIDLPDGARFDNTCRLQIADTQGLGTASIILTVPHMNVQHWRLDMTTFKPWLLNAINNNMGTETTLYYRSSAQFWLDEKLQASESGITAVSYLPFPVHVLWRTEVLDEISGNRLTSHYDYSHGAWDGREREFRGFGRVTQTDIDSRASATQGAHAEPPAPSRTVNWYGTGVREVDVLLSTEYWQGDQQAFPHFTPRFTRYDEKSGDDIAIMPNEQEEYWLFRALKGQRLRSELYGDDDSILASTPYSVDESRPQVRLLPVMASDVPAVLVSVAESRQYRYERVATDPQCSQKIVLKSDALGFPQDNIEIAYPRRPQPELSPYPDTLPETLFTSSYDEQQMCLRLTRQRSSYYHLNHDDNTWITGLMDTSRSDARIYHADKVPDGGFSLEWFSATGAGALLLPDAAADYLGHQRVAYIGPEERPAIPPLVAYTETAEFDERSLAAFKTVMDEQELTKQLNDAGWNVANVPFSENTDFSVWVGQREFTEYANADGFYRPLVQRETKLTGKTTVTWDNHYCVITATEDAAGLRMQAHYDYRFMVADNTTDINDNYHTATFDALGRVTSFRFWGTENGERQGYTPQENETVPFIVPTTVDDALALKPGIPVAGLMVYVPLSWMVRVNVSNQINFSNYEELKSAGIITEDGYLLSLAFRRWQQNNPSSAIPMQANSQNPPHILSVITDRYDADPEQQLRQTITFSDGFGRTLQTAVRHESGETWVRDEYGAIVAESNGEPKTAMTDFRWAVSGRTEYDGKGLALRKYQPYFLNSWQYVSDDSARQDMYADTHCYDPLGREYQVITAKGGLRRSLFTPWFVVNEDENDTADDMTA

SEQ ID NO: 4702 - protein, 1015 aa, Xenorhabdus sp.
KNSVHSNTPSVTVLDNRGQTVREIAWHRHPNTPQVTDERITCYQYDAQGSLTQSIDPRLYERQQTASDNNSVKPNLICLSSLSKKVLRTQSVDAGTSVALHDVAGRPHLAVSANGVSRTFQYERDNLPDRLLRITEQVKGEKACITERLIWSGNTPAEKGNNLAGQCVRHYDPTGLNQTNSISLTGIPLSIMHQLLKNDREANWQGVDESVWKNSLALESFTTLSTADATGTVLMSTDAAGNRQRIAYDVAGLLQGSWLALRGKQEQVIVKSLTYSAASQKLREEHGNGIVTTYTHEPETQRIIGIKTERPSGHAAGEKILQNLRYEYDLVGNVLKSTNDAEITRFWRNQKIVPENTYTYDSLYQLVSVTGREMANIGRQKNQLPIPALIDNNTYTNYSRTYDYDRGGNLTRIRHHSPITDNNYTTNMTVSDHSNRAVLEELTKDPTKVDMLFTPGGHQTRLVPGQDLFWTPRDELQQVILVNRENTTPDQEFYRYDADSQRVIKTHIQKTGNSEQIQRTLYLPELEWRTTYSGNTLKEFLQVITVGEAGQAQVRVLHWETGKPADISNDQLRYSYGNLIGSSGLELDSDGQIISQEEYYPYGGTAVWAARSQSEADYKTVRYSGKERDATGLYYYGYRYYQSWTGRWLSVDPAGEVDGLNLFRMCRNNPIVFSDSDGRFPGQGVLAWIGKKAYRRAVNITTEHLLEQGASFDTFLKLNRGLRTFVLGVGMASLGVKAATIAGATPWGVVGAAIGGFVSGAVMGFFANNISEKIGEVLSYLTRKRSVPVQVGAFVVTSLVTSALFNSSSTGTAISAGTAVAVGGLMALAGEHNTGMAISIATPAGQGTLDTLRPGNVSAPERLGALSGAIIGGILLGRHQGSSELGERAAIGAMYGARWGRLIGNLWDGPYRFIGRLLLRRGISSAISHAISSKGWFGRMIGESVGRNISEVLLPYSRTPGEWIGAAIGGTAAAAHHAVGEDVANAASRVTWSGFKRAFNNFFFNASARHNESEA

SEQ ID NO: 4703 - protein, 2502 aa, Xenorhabdus sp.
LTNIAFMSFSEFRHRTSGILTWRETDFLYQQAHQESKQNKLEELRILSRANPQLTNTTHLNITPSPLNNSYNSWFYGRAHRFVKPGSVASMFSPMAYLTELYREAKDLHPETSQYHLNKRRPDIASLTLTQDNMDEEISTLSLSNELLLHNIQTLEKTDYNGVMEMLSTYRQTGMTPYHLPYESARQAILLQDKNLTAFSRNTDVAKLMDPTSLLAIKADISPELYQILVEEITPENVTELMKKNFGTDDVLIFKSYASLARYYDLSYDELSLFVNLSFGKKNTNQQYKNEQLITLVNNGNDTAKAKLIKRTRKDFYDSHLNYAELIPIKGDEYRYNFSVKKTEPDYMDFRLQNGDKEYVYQDKNFVPIANTHYSIPIKLTTEQITNGITLRLWRVKPNPWHAINANTHFKMMEFPGDIFLLKLNKAIRLYKATGISPEDIWQVIESIYDDLTIDSNVLGKLFYVQYYMQHYNISVSDALVLCNSDISQYSTKQQSSHFTALFNTPLLNGQEFSADNTKLDLIPGESKNHFHLGIMKRAFRVNDTELYTLWKLANGGTNPEFICSIENLSLLYRVRLLTDIHHLTVNELSMLLSVSPYADTKITLFSDTALTQLISFLFQYTQWLTTQKWPVSDVFLMTTDNYSTVLTPDIENLITTLSNGLSTPSFGGDELIHVAAPLIAASIQMDSAKTAETILLWINQIKPQGLTFDDFMIIVVKSDRSENETRNMVAFCQVLGQLSLIVRNIGLSENELTLLVTKPEKFQSETTALQHDLPTLQALTRFHSVIMRCGRYATEILTALDIGALTAEQLAVALKLDAQVVSQALQQTGLGVNTFTNWRTMDVTLQWLDVAATLGITPDGVAALIKLKYVGEPEAPMPTFDDWQAASTLLQAGLNSQQSDQLQAWLDEAMTTAASAYYIKNGTPQQIKSRDELYSYLLIDNQVSAQVKTTRIAETIASIQLYVNRALNNVEGKVSKPVKTRQFFCDWETYNRRYSTWAGVSELAYYPENYIDPTIRIGQTGMMNNLLQQLSQSQLNIDTVEDSFKNYLTAFEDVANLQVISGYHDSINVNEGLTYLVGYSQTEPRIYYWRNVDHQKCQHGQFAANAWGEWKKIEIPINVWQENIRPVIYKSRLYLLWLEQKELKNENENGKIDITDYILKLSHIRYDGSWSSPFNFNVTDKIESLINHKSSIGMYCSSDYEKDVLIVYFHEKKESYSINGLPANKGMTINPDMTFSILTKNDLDAIVKSTLSELDTKTEYKVNNRFATDYLVEYKESTTFQNKLGSFTGNIFDLSYTSPENSHINLTFSPSMEISFLKGSLYNDEVKYLLSMVEDEIVILFDYNRHDDTLGKEEEIYKFGTLDFIISTYSKKPKYFRVLIHGRTKEKISKTSVLEGAAFYMSDGTDFIFYPDIVTDWKDNTGIWHTIFEAFIDNVIHIKEIENLLVIFMHEQPCYFLLLMATDIEITLPLPMQQRIQDKHIGFSLKNGNDVLVALNSEDHVASKPSPESDPMVYDFNQVSADIEGYDIHLVGEFIIKETDIGYNGIIIESPIHIKLKPKDKSNVISLHKMPSGTQYMQIGPYRTRLNTLFSRKLAERANVGIDNVLSMETQNLPEPQLGEGFYATFKLPPYNKEEHGDERWFKIHIGNIDGNSARQPYYEGVLSDTETTITLFIPYDKGYYTHEGVRLGVGYKKIIYDNTWESAFFYFDETKKQFVLINDADHDSGMTQQGVVKNIKKYKGFIHVSVMKNNTEPMDFNGANAIYFWELFYYTPMMVFQRLLQEQSFTEATRWLRYIWNPAGYSVQGEMQDYYWNVRPLEEDTSWNANPLDSVDPDAVAQNDPMHYKVATFMKMLDLLITRGDSAYRQLERDTLNEAKMWYVQALTLLGDEPYFSLDNDWSEPRLEEAASQTMRHDYQYKMLQLRQRAALPTKRTANSLTALFLPQINKKLQGYWQTLTQRLYNLRHNLTIDGQPLSLSLYATPADPSMLLSAAVTASQGGGDLPYAVMPMYRFPVMLENAKWGVSQLIQFGNTLLSIIERQDAEALAEILQTQGSELALQSIKMQDKVIAELDADKLALQESRHGAQSRFDSFNTLYDEDVNAGEKQAMDLYLSSSVLSTSGTALHMAAAAADLVPNIYGFAVGGSRFGALFNASAIGIEISASATRIAADKISQSEIYRRRRQEWEIQRNNADAEIKQIDAQLATLAVRREAAVLQKNYLETQQAQTQAQLAFLQSKFSNATLYNWLRGRLSAIYYQFYDLAVSLCLMTEQTYQYELNNKAAHFIKPGAWHGTYAGLLAGETLMLNLAQMEKSYLEKDERALEVTRTVSLAEVYAGLTENSFILTDKVTELVNAGEGSAGTTLNGLNIEGTQLQASLKLSDLNIAADYPDGLGNTRRIKQISVTLPALLGPYQDVRAILSYGGSTIMPRGCKAIAISHGMNDSGQFQMDFNDAKYLPFEGLPVGDTGTLTLSFPGISGKQKSLLLSLSDIILHIRYTIRS

SEQ ID NO: 4704 - protein, 201 aa, Xenorhabdus sp.
IKVPLVDDHVVVRSGFAQLLSLEPDIEVVGEFSSCVEARYGLPGSGAMVCILDISMADESGLSLLQDIPSGIGCIMLSVHDSATMVEKALKAGARGYLSKRCSPDELVQAVRIVVNNGFYFSPDIVLKLTSSKNNPAALDHLTKRERQIAEMLATGMDVKAVAAELGLSHKTIHVHRANAISKLGVTNNVGLANYFASSDL

SEQ ID NO: 4705 - protein, 306 aa, Xenorhabdus sp.
MSKRLPPLNALRVFDAAARHLSFTKAAEELFVTQAAVSHQMKSLEDFLGLKLFRRRNRSLLLTEEGQSYYLDIKEIFTAINEATRKLQARSAKGALPVSLSPSFAIQWLVPPLSGFNQGFPGIDVRIQAVDREEDKLADDVDVAIFYGRGNWPGLRTDKLYPEYLLPVCSPSLLMGERPLKTPADLVNHTLLHDSSRRDWYAYVRQLDMQQLINVQQGPIFSHSAMVIQAAVHGQGVALANNVMAQNEIDAGRLVCPFNDVLVSKNAFYLVCQDNQAELGKIAAFRKWVLTQAASEQERLGFITSE

SEQ ID NO: 4706 - protein, 309 aa, Xenorhabdus sp.
MRKTFDLNAKMKITLEEMRVFIAVVDSGSITAAAEWLGFTISATSRALLRLEEKVDSTLLYRTTQRIKLSEEGAAFLQKAREVVKLAQEAEEILLSHKDIPSGTLRVDAATPFLLHVIAPLVAQFHEIYPQIALELTNYEGVTDLLEKQTDIAFRIGTLSDSSLHATLLGHSKLRVLASPLYLERFGEPKTVEELQQHCLLGFTAPENLNEWPLFHGDKKGIKITPTIAASSGEVLCNLTRKGVGIVCMSDFMTHEMRESSEFKQVLSHITFEQKQPINAVYYRNQTLSPRLRCFIDFIKNNSLCLNRL

SEQ ID NO: 4707 - protein, 271 aa, Xenorhabdus sp.
MKPITNYEFNDAPLIDGIILVSKAIRPDFPQALVSEQLTALVEEAQQALFSINDHKEKMQSLLTLFYQEWKFGGANGVYCLSDTLWLDSVITSRQGAPVALGALFVHIAQMLAIPITPVIFPTQLILRIDLPDQPAWFINPMNGETLNEHILDVWLKGNIGPTVRLEKKDLQEADNSSLVRKITDTIKVSLMEEKKMELALKASEVVLMFDPDDPYEIRDRGLIYAQLDCDHIAVSDLSYFVEHCPEDPISEMIKMQINSIDRERRTIVLH

SEQ ID NO: 4708 - protein, 302 aa, Xenorhabdus sp.
MWSDYSLEVVDAVARTGSFSAAASELHRVPSAVSYTIKQLEEWLAVSLFERRHRDVELTEAGAIFVKDARSVIKKMNHTRHQCQQVANGWRGQLSIAVDQVVKPERTRQLILDFYRHFPDIELFIYPEVFNGVWDALVDGRVDVAIGATRASPVGERYSFRDMGFMPWLCVASPEHELAFVTEKLNDDQLRPYASLCLEDTSRALPKRDTWALDNQRRLVVPDWEAGLSCLMEGLCVGMVPKHRALPLIRQGKLCVLELEQPLPDSPCCLTWSQKSHSPALSWLLEYLGDNTTLNAEWLQED

SEQ ID NO: 4709 - protein, 223 aa, Xenorhabdus sp.
MRILIVEDNALLRHHLKVQLRDIGHQVDAAEDSKEADYYLKENHPDVAIIDLGLPGEDGLSLIKRWRGDHINIPILILTARESWQEKVTVLNAGADDYVTKPFQLEEINARIQALMRRNSGLASQVAELPPFLIDLSRKEFSVNGKKIKLTAFEYTIIETLMRNNGKVVSKELLMRQLYPDAELRESHTIDVLMGRLRKKILNEWPDEVIVTVRGQGYRFDVK

SEQ ID NO: 4710 - protein, 203 aa, Xenorhabdus sp.
MYTPHKMQMQDREDITKFISTYSFGLLVSPSLAGTHLPLVLNPDEGEYGTLYGHISKANPHWKELENQPVLAVFTGPHAYISPTWYESEHAVPTWNYTAVHCYGVTKFLNGNETQSALENLVNKYEPGLMNNTELMPEEYLNKQRQAIVGFKITITKIDAKEKLGQHKNQGDQRGVFSALKESKMPDNKELANYMKIRNVGTL

SEQ ID NO: 4711 - protein, 143 aa, Xenorhabdus sp.
LELTLGSDLARLVRVWRALIDHRLKPLKLTQTHWVTLYNISLLPPEQSQIQLAKAIGIEQPSLVRTLDQLEEKKLITRHTCANDRRAKRIKLTEESENFIREVDSVIGSTRKDILEGITHDELILLASVIKKIEKNISQLHKQ

SEQ ID NO: 4712 - protein, 89 aa, Xenorhabdus sp.
KGVQVFISKDLVNFIVVAKNKSINKATKELFITESPISRSLKKLEFSLGVKLFVRKSQGLILTEEGECLYNKVFSIYEELKNIENDYKN

SEQ ID NO: 4713 - protein, 286 aa, Xenorhabdus sp.
WKKCNFEQYKEAHSLFGGCVLTHPNIVSFLNRHILDSHFSFYIKEKKNSIHGACFSANKTKLIEKIHGEYPLSIDEVIFPIEADKKLFLPIKSKRLSPLHKNNARNASYKAPFSKRQICLIKDNFSYKTRRNRKNEINRFTRAGGEIRSSNEFSAEKLVDIYIDLYQKRWNYHHSSEERQRLLEIYTELREHIFGYVLFINGMPCAYDFVLRADSPKWISFDAINGGYDPEYAHLSVGSILMWVNVQEAKALCQAADKTMRYSLGNPTLEYKNRWCETFPLGKILF

SEQ ID NO: 4714 - protein, 96 aa, Xenorhabdus sp.
MSESPKKRWYVIQAFSGFEGRVAQSLREHIKLHDMEDSFGEVMVPTEEVVEIRSGQRRKSERKFFPGYVLVQMVMNDATWHLVRSVPRVMGFIFRA

SEQ ID NO: 4715 - protein, 175 aa, Xenorhabdus sp.
MESSFTPTEELLNCRVAQQKELNKSLPYQEILLTRLSMHVQSKMLENRNNMLRAQGINETLFMALMILDTKESRSIQPSELSAALGSFRTNATRIADELEKQGWIERKESHNDRRCLHLHLTEKGTIFLNSLLPPQHECLVKLWSALDLEEQKQLENLMRKLLTQLDNIGDCLKK

SEQ ID NO: 4716 - protein, 287 aa, Xenorhabdus sp.
MRITLRQLEIFAEVLKSGSTTQASQQLALSQSAVSASLTDLEGQLGVQLFDRVGKRLVTNEHGRLLYPKALALLEQTGEVEQLFKLEMGALRLAASSTIGNYMLPEMLAKYRKEYPDTPLELHISNTEDVIKSVAEFRVDLAFIEGLCHNPDLITQPWMKDELIVFSSPESPLVRSNLTLEDLIKAPWILREKGSGTREVLDQLLFSQMPRFNIAMELGNSEAIKHAVQYGMGISCLSRRVVREQLKNGTLVELVIPGLNLYRTLYLIYHRQKHISNALQKLLSYCQ

SEQ ID NO: 4717 - protein, 99 aa, Xenorhabdus sp.
VKTLKEKIQEFSVEDRKDIKQMADEQILETGLQLLREELNISQQKLADNLGISQPAITQIEQRGNDIKLVTLKRYVEAMGGKLSLTVEFPTGNGKIFHI

SEQ ID NO: 4718 - protein, 261 aa, Xenorhabdus sp.
MAWLRQSDQFDPDNLNVLVAGIAAEMGQHDSGFHQHGMGQLLFTQRGCIKITLASQISILPPTRVAWIPPKTQHRAEMRGSIGYRSIYLDISEVQCLPEQCAILEATPLLQAVLERIAISPFDTDWEQGKNANLLAVFLDEIGEAHREPTLLPLPSDRRFTSLSFEQLPPSLQVISTYIGASEKTITRIFKRETGMNYQQWRQQWRLVKAIELLAQGKTLSYVAQELGFTSDSAFVTFFRKIMGRPPREYMAGSERKTDRG

SEQ ID NO: 4719 - protein, 303 aa, Xenorhabdus sp.
MMNINIELRHLRYFIAVAEELHFGRAAERLNISQPPLSQQIQSLEANIKAKLLARNNRTVTLTPAGHMFLKEAYQILSQVDAAATKAARMQQGELGEISIGFTSTTPFMHKVALSLRQFRERYPDVLVHMHQMNTKTQIAPLQTGRIDIGIMRNTLLPDNLQHRLLFRERFMLAVYDGHPLLECVNEGITIKMLSEYPLVFFERDVGTALYDEIITLFISAGVSPMISQEAGEAMTILCLVAAGLGISIVTESFIRMKIDGVQYIPLAHMSVHSEVWLVNHKKRQNNPAVERLTELLLSNIYS

SEQ ID NO: 4720 - protein, 158 aa, Xenorhabdus sp.
MKQIPMTVRGADKLREELEHLKNVRRPQIIAAIAEAREHGDLKENAEYHAAREQQGFCEGRIQEIEAKLSNAQVIDITKMTNNGRVIFGATVTVLNVDSDEEQTYRIVGDDEANIKENLLSVNSPIARGLIGKEVDDVAVIETPGGKVEYEVLNVEYV

SEQ ID NO: 4721 - protein, 223 aa, Xenorhabdus sp.
MSAQYTVLIVEDEPKLGQLLVDYLQTANYQTQWLVRGDEVVAHVQQRQPDIILLDLMLPGLDGLSVCREIRKFSDIPIVMMTAKTEEIDRLLGLEIGADDYVCKPYSPREVIARVKTILRRCYRPQDIVSEQGALTIDENHFQARYLERVLDLTPVEFRLLKIISSQPGRVFSRDQLLNNLYNDHRIVNDRTIDSHIKNLRRKLEQLDEDKSFIRSIYGLGYL

SEQ ID NO: 4722 - protein, 419 aa, Xenorhabdus sp.
MNLTELKNTPVSELITLGENMGLENLARMRKQDIIFSILKQHAKSGEDIFGDGVLEILQDGFGFLRSADSSYLAGPDDIYVSPSQIRRFNLRTGDTISGKIRPPKEGERYFALLKVNEVNFDKPENARSKILFENLTPLHANNRLRMERGNGSTEDLTARVLDLAAPIGRGQRGLIVAPPKAGKTMLLQNIAANIAHNYPDCVLMVLLIDERPEEVTEMQRLVKGEVIASTFDEPASRHVQVAEMVIEKAKRLVEHKKDVIILLDSITRLARAYNTVVPASGKVLTGGVDANALHRPKRFFGAARNVEEGGSLTIIATALVDTGSKMDEVIYEEFKGTGNMELHLSRKIAEKRVFPAIDYNRSGTRKEELLTTQDELQKMWILRKIIHPMGEIDAMEFLINKLAMTKTNEEFFDFMKRS

SEQ ID NO: 4723 - protein, 343 aa, Xenorhabdus sp.
VAMEKKNCALATMKDVAKVAGVSTATVSRTLMNPDKVSAHTRQKVENAVLEVGYYPHNLAKNLRRNESRAILVIVPNICDPFFNEIIRGIEEAAAQHGYLVLIGDCKHQQQQEHAFINLLITKRIDGMILLGSNIPFDVSKEEQKNMPPMVMANEFAPELELPTVHIDNLTSAFNATHHLQTLGHKRIACITGPESMPLCQYRLQGYIQALRRAGLPIRDEYIIRGDFTHESGAELAEKLLILANPPSAIFCHSDVMAIGAMWQAKKMGLKLPEDLSIIGFDNISTAQYSDPPLTTVAQPCYEIGHNSMLLLLEQLQGRMVSKGSRLLDAELLIRGSTCSPKS

SEQ ID NO: 4724 - protein, 309 aa, Xenorhabdus sp.
MRLGMNIRDLEYLVALAEYRHFRRAADSCHVSQPTLSGQIRKLEDELGVMLLERTSRKVLFTQQGMLLVEQAKTVLREVKVLQEMASLQGESMSGPLHIGLIPTVGPYLLPLIIPELHKLFPKLEMYLHEAQTQNLLAQLDSGKLDCAILAAIKETEAFIEIPLFKEPMKPAVYEEHKWAERDKINMSELTGEKLLMLEDGHCLRDQAMGFCFQAGAKEDTHFRATSMETLRNMVAAGSGITLLPDLAVPKEKKRDGICYLECHNPLPERSVILVYRPGSPLRNRYEQLAEAIRTRMKNYFDISGTTSK

SEQ ID NO: 4725 - protein, 129 aa, Xenorhabdus sp.
MTVPVNYSRNKLLKSFSALGPYLRELKCQNDYFFFDCLAVCVSAKAAPEKREFWGWWLELERQEKGFVYNYQIGLFDKHGEWLPMNIKKEADLRQLELTLQAFHQRLSDSLGNLKLTLSPSENTFTPQN

SEQ ID NO: 4726 - protein, 193 aa, Xenorhabdus sp.
VQLPRNIAQHAKQNIAAIAYYFGSKEGLYLAVAQHIADRLKAEFSLLIASIDQFFITTPQPYPPEQILAFIHQGLISYNHLIFDKSSLNLSRIMSHEQLTPTEAYSVIHEQGLAPIYSRLNKLIAHYIGADEGHVSTQIHTHALLGEILSFRLAREALLRQTGWDNIGTREYELINQVLTQHINILLNGLRKK

SEQ ID NO: 4727 - protein, 470 aa, Xenorhabdus sp.
VLGPIAATLTAQAFDAVELLYNYPEDQVRSYLAWLQELVTMPICAHAISLSSPVNFGEIYVQANQQLSKLTVEGCELSILLSPGTPAMQAVWILLGKTHYPCQFYQSSLEQGVQQVDIPFEVSAEYLPAAKSIDSAKISQLAEASAPINAAFDNIVTRNPRMQSLKAQAQILAEREVPVLLYGESGTGKELFARAIHNASHRTNKPFVPVNCGAIPTELVDSVLFGHKKGAFTGALADKAGLFEQANGGTLFLDEFGELEPSIQVRLLRILQEGTFNPVGGTKEQKVDVRLITATHRNLIEAVSNGSFREDLFYRVAVGVLHLPPLRERDGDLSLLADSLVKAMSIHDSMLRHKKISPDAKNLILQCPWRGNVRELQSTLLRAALWCQGDDITVADIRQALFHMPEPETGLMNMDISQSIDIQYIIGSVAATYIRKALDHSGQNKTRAAQLLGLKNYQTLNNWMEKYGIS

SEQ ID NO: 4728 - protein, 210 aa, Xenorhabdus sp.
SKKIAEVIRNKLVIGELLPGQRLSEAALSEQLQISRNTLREVFRTLTQEGLLKHQPNRGVFVAIPDIASIIDIYRVRRLIECQALAQAYPMHPSVNKMQEAVISAGQYRNKQEWVGVGTANMRFHAAIVELADSERLMTFYRNISAELRLAFGLLNDPELLYAPYVDKNKHILELLNSGQTELAAQKMEDYLNLSERTVLAAYSRINNDQ

SEQ ID NO: 4729 - protein, 1146 aa, Xenorhabdus sp.
MSAKYRYQLPERRGDIRQLGHLIGAACAIECAEIIERHSGPVLLVTKDMQNTLRLRDEIPQFTRTSINMLSDWETLPYDSFSPHQEIISNRLSTLYQLPFMTEGALILPVNTLMQRVCPHEYLQGHALIMHKGQRISRDKLRANLEQAGYRSVEQVLEHGEFATRGALFDLFPMGSEHPYRIDFFDDEIDSLRTFDVDSQRTLEEVEKISLLPAHEFPTDKEAIELFRSQWREKFDVRRDAEHIYQQVSKKMLPAGIEYWQPLFFEQPLSTLFDYLPKNTLIIVQDLMNTAERFWQDTEQRFESRKVDPMRPLLPPDQIWLPVDKLFAELKKWPRIQIRNEELPKKAGNINLAYQPLPDISVAAHHKAPLDKVRRFIEQFSGKVIFSVESEGRRESVNELLSRIKIHPTTIHQLEDAKEAGCFLMVGSAEQGFIDEEKKLAFICESDMLGERVSRRRQDNRRTINTDTLIRNLAELRPGQPVVHLEHGVGRYQGLTTLEAGGIKAEYLILTYAGEDKLYVPVSSLHLISRYAGGAEESAPLHKLGGEAWNKARQKAAEKVRDVAAELLDIYAQRAIKPGFAFKHDREQYQLFCQNFPFDTTPDQEQAINAVLSDMCQPIAMDRLVCGDVGFGKTEVAMRAAFTAINNNKQVAVLVPTTLLAQQHYDNFRDRFANWPVHIEVMSRFRSAKEQQQVIDMAAEGKVDIIIGTHKLLQSDLRWKDLGLLVVDEEHRFGVRHKERIKAIRADVDVLTMTATPIPRTLNMAMSGMRDLSIIATPPARRLAVKTFVREYDSLVVRESILREILRGGQVYYLYNDVENIEKAKSRLEELVPEARMVIGHGQMRERDLERVMTDFHHQRFNVLICTTIIETGIDIPTANTIIIERADHFGLAQLHQLRGRVGRSHHQAYAYLLTPHPKAMTTDAQKRLEAIASLEDLGAGFALATHDLEIRGAGELLGEDQSGQMASIGFTLYMELLESAVDALKNGREPSLEDLTNNQTEIELRIPVLLPDDYIPDVNMRLSFYKRIASAQNDNELTELKVELIDRFGMLPDPGRHLLQSASIRLTAQKLGIKRIEAHEKGGFIEFSQSNKVDPHYLINLLQTQPNIYRLDGPSKLKFINELTERTARLSFIQSLLEAFEQHQV

SEQ ID NO: 4730 - protein, 207 aa, Xenorhabdus sp.
IKVALIDDHVVVRSGFAQLLTLEDDITIVGQYSNSIEAWPALLKKKIDIVIMDIAMPHENGLQLLARLRPQKPNFRTIMLSIYDTAALVQTALDSGARGYLTKCCGAEELVQAVRTVHNGDIYLCADAMKALRQKPQELDVLQVLTPREREIFNLLIHGMNAKSIAEQLKLSPKTVHVHRANILSKLQCDSTIELVHYALKNQIIAG

SEQ ID NO: 4731 - protein, 296 aa, Xenorhabdus sp.
MGKERALTLESLRVMDAIERRGSFAAAADELGRVPSALSYTMQKLEEELDVVLFDRSGHRTKFTNVGRMLLDRGRVLLEAADKLTTDAQALARGWETHLFIVCEALFPVESLFPLVDKLANKSNTQLSLVTEVLAGAWERLETGYADIVIAPDLHFRASAEINSRPLYSIKNVYVASMDHPIHNEPEPLSDATRVKYRGIAVADTARERPVLTVQLLDKQPRLTVSSLENKRRALLAGLGVATMPYPMVEKDIAEGRLRVVGSEYIHETNIIMAWRRDRMGEAKAWCLREIPKLFK

SEQ ID NO: 4732 - protein, 297 aa, Xenorhabdus sp.
MPIKLNQLRAFVEISRYGSIRAASRTLSLSQPALTKSIRELEDSLGAKLFIRSNQGIHLTECGQSFLSRASLILEELRIAQEDIQQRIGLLGGVINIGVTGCIVRTIMPKIITQFHRNYPTVKLRIVEGQLLAMLPQLRQGELDFSVNTYYPDSTDADLSFEKLMEKEYKVIVRKGHPKEHATSLEELSDCDWTMPTPKGTYYRQLFERLSLMERPPVFSVICETLTSCMSLVAKSDFVTIVAVDLADDALFHQQFVALDLKEQLPLAMFCLIRRKDTNLTPAGEHLARLFRMYCRD

SEQ ID NO: 4733 - protein, 238 aa, Xenorhabdus sp.
MKKKRPVLQDVADLVGVTKMTVSRFLRNPNQVSEPLGKRIAAALDQLGYIPNRVPDILSNSTSRTIGVLLPSLTNQVFAEVIRGIEYMTDRHGYQTMLAHYGYSAQKEEERLLSLLSYNIDGLILAERTHTPKTLKVLETTGIPVVELMDSVSPCLDVAVGIDNFEAARQMTESMLGRGCRSIVYLGARQDERTLIRLQGYEVAMRSAGLQPKKMMTTASSSKSLGAQLLQETCLKYP

SEQ ID NO: 4734 - protein, 319 aa, Xenorhabdus sp.
MNFQQLRIIREAERCHFNLTEVAKVLYTSQSGISRHIRELEEELGVELFIRHGKRFLGLTEPGKEMLTIARRILNDADKAQRLAEHFTGQHQGVLTIATTHTQACYSLPQVIKVFREIYPGIRLVLNQGSPTEIMKMLLNGEADIGIASEMLTQNSNITAFPWFDWHHSLLVPAEHELVWNPDITLEQLATYPLVTYRYGIAGRSQIDKAFHHARLNPDIVLSAQDSDVVKTYVKLGLGIGIVAETASQHNLDPDLVTLKARHLFSPNTVWMAVKHGQLQRDYLWEFILLCNPDLSLDKIKNSVVAGNKNIPTWLDFEI

SEQ ID NO: 4735 - protein, 525 aa, Xenorhabdus sp.
MKRRVAIGVLGTTLDRRGKKANRWTKWRPTIGLCQQPELPIDRLELLYQADNYSLAQRVKEDIEETSPQTRVVLQEIQIDDPWDFEEVYTALLDFAVRYPFDIENEEYLVHITTGTHVAQICWFLLTEARYLPAQLIQTSPKNGDRDSHPEGVYTVIDLDLSRYTTLTSRFLREQQEQVAFLKSGIATRNASFNHLIDQIERVALRSSAPILLTGPTGAGKSFLARRIYQLRQSRHLLKGRFVEVNCATLRGDNAMSTLFGHVKGAFTGAIQPRTGLLREADGGILFLDEVAELGLDEQAMLLKAIEEKNFLPYGSDREVYSDFQLIAGTHRDLRDRVAQGKFREDLYARINMWTYQLPGLAQRREDIEPNIDYELARYAQMQQTQVRFDKEARQIYLRFACSEQAKWRGNFRELSASVARMATFAENGRINQHLAEEEIIRLRQHWRGENSSALLPDHLAEIDLFDRQQLETVISVCRGSASLSEAGRKLFAVSRQQKKQPNDADRLRKYLARFGLDWESIQQD

SEQ ID NO: 4736 - protein, 339 aa, Xenorhabdus sp.
IMNQFTDNLLGEANNFIEVLEQVSALAKLNKPVLVLGERGTGKELIAHRLHYLSPRWQGPFISLNCAALNENLLDSELFGHEAGAFTGARSKHQGRFERADGGTLFLDELATAPMQVQEKLLRVIEYGYLERVGGNQSLQIDVRLICATNEDLPAMAANGKFRADLLDRLAFDVVQIPPLRQRQQDIMVLAQHFAVQMCQELNLPFFPGLTEKAKRQLLAYSWPGNVRELKNVIERSIYRHGDNQNALDTIIINPFAVSSETHAQKSANDSSIKHKTDNRSLPDLPLDLKQWQNDCEKQLIIQAIAESQFNQKKAAAKLSLTYHQLRGLIKKHSISITD

SEQ ID NO: 4737 - protein, 193 aa, Xenorhabdus sp.
KKSASDTRQHILDVAKSIIAHKGYTAVGLAELVTAAGVPKGSFYYYFKSKEEFGQILLKEYFNEYLSRARMLLSSTEGTARERLLNYFRVCSEIQTTGQPEDKCLTVKLGAEVCDLSEGMRSILCRGTVDIIDQLTQCIESGQSDNSISADVSPRVLAESLYQLWLGAFLVAKVAKDTAPFNSAIEMTQRLLS

SEQ ID NO: 4738 - protein, 444 aa, Xenorhabdus sp.
AHSRYKFIVDKFAADIRTGRLPPGTRLPTHRQLAIDEKMSLVTATRVYTELEAMGLVSGETGRGTFVREISLPADLGIEHHVASDMVDLSFNYPSFPSQTELLRNSLRQLATSGDLEALLRYQPHGGRLHERTVIAQYLKTRGLKSITTDNTLIVSGAQHGLATTVMAMLKPGDVVAVDTLTYPGFKALAKTYHLELVSVPAGNEGTDLDALEKLCQHRHVRAFYTMPTLHNPLGWVMSQQHRQRLVALARQYNLLLIEDGSYAFLVENAPPPLAELAPESTIYVSGFSKSIATGLRVGFIVASVEKIPVLERIIRVTTWNTPALITAITCEWITNGMITQLEEDKRHDAQARQLIVKRVFKGMKYISHPSSYFVWLPLDEGVRADQVTMALMKEHISVSTAEPFATSSYVPHAIRLAIGSIEQKSLQTVLEKVKSIVSLYSCL

SEQ ID NO: 4739 - protein, 230 aa, Xenorhabdus sp.
MHKILLVDDDRELTALLKELLEMEGFNVVIAHDGEQALQFIDSSIDLLLLDIMMPRKNGIETLKELRQYHQTPVIMLTARGSDLDRVLGLELGADDYLPKPFNDRELVARIRAILRRSNWSEQQADNSTPILEIDKLQLNPGRQEASFDGDILDLTGTEFTLLYLLAQHIGQVVSREHLSQEVLGKRLTPFDRAIDMHISNLRRKLPNRTDELPWFKTLRGRGYLMVSEK

SEQ ID NO: 4740 - protein, 162 aa, Xenorhabdus sp.
MGNWYLLYCKRGQISRAIENLERQDVICLTPTAKIEKIIRGKRTTVTEPLFPNYLFVNFDPEVIHTTTVNSTRGVNHFIRFSTYPAVVPQQLIDELMNATEQEFTAPETPVSGDTVLITEGIFEGIQAIYNEPDGETRSILLLNILNKEVSKVLDNKQFTKL

SEQ ID NO: 4741 - protein, 297 aa, Xenorhabdus sp.
QLRSVDLNLLTVFDAVMQMQNITRAAQALGMSQPAVSNAVARLKTMFDDELFVRHGRGIQPTARAKQLFGPLRQALQIVHNELPGAGFDPDNSVRTFNLSICSPLDIRLAAQIVGEIKRHSPNIDVVIKTQINDNIEKKLKYQEIEFVISYTQFEHPDFQHFPLFDDELVLAVSQSHPRIGECISQQQLQDERHAIVALDNSDSFSKPYYENSELIDSVSYQGTDLNSVLNIVSQTYLVAIAPKWMVEHYSGQLNIRTVSLPNNSVSRPCYLIWHASMNRDKGHQWMKSLLSCLGDR

SEQ ID NO: 4742 - protein, 321 aa, Xenorhabdus sp.
ITLMREMAIFAKVVETGSFSETARQLAATPSAISRSVARLEKALGTRLLQRTTRKLRLSESGQQVYEHCLDMMNSAQAVMSASGNFSGEPLGIVRVSVPKAVGRFVVHPHIPAFLTRYPKVDVSLRLDDRYVDLIDDEVDLAIRITDQPPPGLMGRRLLKIWHMLCATPEYLAEHGIPQHPHDLKTHSCIYLGEEPGDSRWKFSQGSKTATVNIQGRYAANHTGVRLDAALKHIGISSLPYFTARHALQQGRLVQVLPDWNFKANYSGELWVLYPPTRYLSPKLSVFIEFLAERLRQENIQDKKVAKEPHHYHYELPEAGE

SEQ ID NO: 4743 - protein, 307 aa, Xenorhabdus sp.
KHNLQSMNNLPFLQDLRVFLLVAKRASFAAAAEEIGASPAFISKRIAILENVLNVSLLHRTTRRVSITEDGERIYEWAQHILNDVNQMMDELCELRQEPQGKIRITSSFGFGRKFVAPALSALIQTYPQLDLRFDVEDRLVDLATEGIDLDIRIGDEIDDNLIARKLASNRRILCASPAYLARHSVPKSINELPSHACLVIKERDHPFGIWKLQNSTGVQSIKVTGPMSSNHGEIIHQWCLDGHGIILRSYWDIRESIKSGALVHILPEYYQSANIWAVYVTRLAMSARIRVTVEFLERYFKEHYLE

SEQ ID NO: 4744 - protein, 306 aa, Xenorhabdus sp.
MRVSHLNFNHLYYFWHVCKEGSVVGAAEALYLTPQTITGQIKALEERMGGKLFKRQGRGLVPSELGQLIFRYADKMFMLSQEMLDIVTYSRESNLLFDVGVADALSKRLVSKVLETAVVEHEKIHLRCFESTHEMLLEQLSQHKLDMILSDCPVDSTQQEGLFSVKLGECSISFYCREPIPEKPFPECLEERRLLIPGRRSMLGRKLLTWIRNKNLEVEVLGEFDDAALMKAFGMYHNAIFIAPSFYANDTFADSDIIEIGRLESVQEEYYVIFAERMIQHPAVQRVCNKDFSDLFNVPLKNKPER

SEQ ID NO: 4745 - protein, 139 aa, Xenorhabdus sp.
MNISEIAQKTGLTSKAIRFYEEKDLITAPGREENGYRFYQQKHIDELILLRQAREVGFTLEECRELLRLFHNPNRHSIDVKATTLQKVAEIEKTIAELQNIRKKLLTLAAECPGDDGAECPIIEQLSGICAKTWLMIPA

SEQ ID NO: 4746 - protein, 235 aa, Xenorhabdus sp.
SQHQQTLVNCCLNTIAHIIPVSATIYYLVNEKWQPENHILHGITSDVYQAYVAYFCQLDPLHPENFRHNEQRLVSMNDNMKESGQQFYHDFMQPNNLTDRVEIFIRRGNKILAGLSVFRDCPFQHQEVMRLHSIIPVAELMTFDILPDAQVTFTAKEQEIIQWVREGASNKRIALQLSISLSTVKTHLRNIFAKASVTNRTELVSSGFMRRDLSGYGSAPAAIINNSCRDGNPMS

SEQ ID NO: 4747 - protein, 161 aa, Xenorhabdus sp.
MGKSNYITREGWQALDQELKYLWKTERPQVTQAVSDAAALGDRSENAEYIYGKKRLREIDRRVRFLSKRLDVLQIVDPDPRQEGKVFFGAWVKVENEKAEEYIFRLVGPDEFDPAKKWISIDSPVARALLGKRVDDEVTVMTPNGLAVYWILEIRYQPPEI

SEQ ID NO: 4748 - protein, 239 aa, Xenorhabdus sp.
MQESYKILVVDDDMRLRVLLERYLSEQGFQVRCVANAEQMDRLLTRESIQLIVLDLMLPGEDGLSICRRLRSQNNPIPVIMISAKGEEVDRIVGLEIGADDYLAKPFNPRELLARIRAVLRRHSNELSGAQTPDNAVVTFGKFKLDLGTREMFHKDEQLSLTSGEFSVLKALVSHPREPLSRDKLMSLARGREYGATERSIDVQVSRLRRLLEEDPAHPRYIQTVWGLGYVFVPDGNQA

SEQ ID NO: 4749 - protein, 297 aa, Xenorhabdus sp.
QVFVTIVEQGSLSAAAERLDMSRAMVSRYLSEMERWSEIRLLHRTTRQISLTSAGEQAYQRSLKLIELAEAMPVQQSTEAKTLKGQLRVSCCQALGISALSVAIPEFMRKYPQIGVSLEISNKATKLVEERIDLAIRITNNLGLNLIARPLSTCRSVICAAPSYLAGKRFPQKPDDLAIHNCLTYNLFDKNLWLFEKQDEQYSIPVSGTLSANESTVLMEAALQGAGISMQPYYSVSPYLKSGQLIELLPDYQPQTMGIYGIYVSRQNMPATLRALLDFLVEWFDSSSHWQQLTLKS

SEQ ID NO: 4750 - protein, 314 aa, Xenorhabdus sp.
MHACSWRHIEIFHAVMTTRNLTDAAVLLKTSQPTVSRELARLEQLLKFKLFDRIKGRLFPTAQGLRLFEEVQRSYYGLERILNAADSIRQFEYAQLSIACLPVFSQSLLPSVCRSFNQSYPDAQLTIIPQESPLLEEWLSAQRHDIGLTEHMQTPAGTERETLLTLNEVCVLPESHPLAQKPQLTPEDFHDQPFISLSITDSYRKLIDAIFNEHQVSRRMIMVTHSASSVCAMVSEGIGVSIVNPLTALDYLNKKAQHKNTGFCIRPFSIEIPFIVSLIKPLHRPSSEPVEIFISHLKQQAKLFPQKLASAFQR

SEQ ID NO: 4751 - protein, 340 aa, Xenorhabdus sp.
MKKLVLAGVLSLASASWAQAADRIAFIPKLVGVGFFTSGGQGAVAAGKALGIDVTYDGPTEPSVAGQVQLINNFVNQGYNAIIVSAVSPDGLCPALKRAMQRGVKVLTWDSDTAPECRSIYIDQGTPKQLGGLLVEMAASQVKKEKAEKQGKMKVAFFYSSPTVTDQNQWVKEAKDKITAEHPDWEVVTTQFGYNDATKSLQTAEGILKAWGDLDVIIAPDANALPAAAQAAENLKRKDVAIVGFSTPNVMRPYVENGTVKQFALWDVVKQGKIAIHVASEILKKGDLNVGDKLTIPDIGTLEVSPNSVQGYNFEAKGNGIVVMPERVIFTKENINQYDF

SEQ ID NO: 4752 - protein, 312 aa, Xenorhabdus sp.
ENSVSGNNMSEEELLARVTWFYYHDGLTQGDIGELLGLSRLKVSRLLEKGRRSGVIHVQINSRYEGCLELEDALKKRFNLNKVRVLPALEGINLNTRLGTGAAHLLMSLIGPRQLLAIGFGEAPMCTLQHLSGFISSQQVRLVTLSGGVGPYMTGIGQLDADCPVSIIPAPLRASTRQVATTFREERSVRDVILTACAADIAVVGIGAINQRQQATIMRSGYISNGEQLMFGRKGAVGDILGYFFNAEGELISDIDIHQELIGLSLPELKTIPNVIGVAGGIEKADAIVAALKGGYINSLVTEEKTARAMLM

SEQ ID NO: 4753 - protein, 229 aa, Xenorhabdus sp.
MVRRILVVEDEAPIREMVCFVLEQNGYEPVEAEDYDTAVGCLSEPYPDLVLLDWMLPGGSGIQIIKQMKRNNTTKDIPVMMVTARGEEEDRVRGFDVGADDYITKPFSPRELIARVKAVLRRISPMAAEDIINIEGLMLDSISHRVSSPGQSVDMGPTEFKLLHFFMTHPERVYSREQLLNYVWGANVYVEDRTVDVHIRRLRKALEMGGHDKMVQTVRGTGNRFSTRY

SEQ ID NO: 4754 - protein, 190 aa, Xenorhabdus sp.
MNTTEDWHSSEVIAALRKLGTNIAELSRESGLKHGTLSNTLNRGWPKGEWIIAQRLNLHPSQIWPSRYFDSFGNLKKRIPRRSKWAGGESVKIFDNLLAAARNPSDNANQTDSITGECIFKGLQLLRQELNFPPREVAELMDIPLTSMMQIEQLGKDVKLSSLKRYIEAIDGKLRLWVEMPNGDIRTFRI

SEQ ID NO: 4755 - protein, 94 aa, Xenorhabdus sp.
SYIDSHLGERLSVSDLAAVAGLSRAHFSRIFTASEGLPPAEFVLQRRLRRAAKLLTTAGNIPVKEVSVLCGFEDPNYFSKVFRRLYGTNPSEFR

SEQ ID NO: 4756 - protein, 218 aa, Xenorhabdus sp.
  unsure (1)..(218): unsure at all Xaa locations
LNDLYYFVQVVDHGGFAAAGRAIGLQKSKLSRRITLLEARLGVRLIQRSSRRFSVTDIGQEYYRRCLAVLVEAEAANALIAQHHDEPRGLLRVSCPTALISFQFGALFAKFLTAYPKVDLHLESTNRRVDVIGERFDVSIRVRFPPLEQAHLMMPKLXXXXXXXXXXXXXXXXXXXXXXXXXXXXXXXXXXXXXXXXXXXXXXXXXXXXXXXXXXXXX

SEQ ID NO: 4757 - protein, 129 aa, Xenorhabdus sp.
  unsure (1)..(129): unsure at all Xaa locations
MVDQRIKFRHLQTFVEVARQKSVIRAAEILHVSQPAVTKTIRELEEILGVSLFDREGRGIRISRYGEVFLRHAGATMTALRQAVDSVSQEAARAGPPVRVGALPTVSVRIMPQATLEHMARXXXXXXXX

SEQ ID NO: 4758 - protein, 75 aa, Xenorhabdus sp.
MDKLGTLGIFVQAAEGGSFVAASQRLGLSSSAVGKAIARLEQEMGGRLFHRSTRSMTLTEEGSFFLDTCRRILSE

SEQ ID NO: 4759 - protein, 150 aa, Xenorhabdus sp.
DGNLDFAFIRPPAPIPEGVTTHVVLREPLMAALPENHPLAYTLQVDLRNLAGETFITPRQPPDVGFHYNTIEACNEAGFQPAISPEGRDYTTIASMVAIGLGVALVPRSLDCLRLPGLRYVPLAASSTTSDLAIAHRKTEASPAVRAFIL

SEQ ID NO: 4760 - protein, 51 aa, Xenorhabdus sp.
SQGLCTSLYEVILEQVSQHCSEELHDLLSLACDINQEVYYSLYAAVNGEDE

SEQ ID NO: 4761 - protein, 314 aa, Xenorhabdus sp.
IGKQLDLYHMQEEAPGMAFWHNDGWTIFRELETFVRVKLKEYEYQEVKGPFMMDRILWEKTGHWENYKENMFTTSSENREYCVKPMNCPGHVQIFNQGLKSYRDLPLRMAEFGSCHRNEPSGALHGLMRVRGFTQDDAHIFCTEDQILQEVSSCIKMIYDVYGTFGFEKIVVKLSTRPEKRIGTDKQWDEAEADLAEALKTNGIEFEYQPGEGAFYGPKIEFTLYDCLDRAWQCGTVQLDFSLPARLSASYVGENNERKVPVMIHRAVLGSLERFIGILTEEYAGFFPTWLAPQQVVVMNITDGQSDYVQEFFK

SEQ ID NO: 4762 - protein, 276 aa, Xenorhabdus sp.
VISVFDMFKVGIGPSSSHTVGPMKAGKQFVDDLVNQGLMSSITRVAVDVYGSLSLTGKGHHTDIAIIMGLAGNMPATVDIDSIPGFIRDVEQTQRLPLANGLHIVDFPRDGGMNFRSDNLSLHENGMQIHAFAGDENVYSKTYYSIGGGFIVDEEHFGKPSQDTKPVSYPFSSAAELLINCSKTGLSLSGLMMKNELDLHSKEEIAEYFADVWDTMQACIERGLNTEGVLPGPLRVPRRAAALHRMLTSSNKLSNDPMNVVDLINMFALAVNEKNA

SEQ ID NO: 4763 - protein, 245 aa, Xenorhabdus sp.
QLNRPGLSAAVFAGTGIGILVSGVLAVGIQSWGMDAAQAWVIYGILALLCSVYASRYLPRRGELHRSQIATQKLALTPEIKRLVWSYTLAGFGYILPATFLSQMASERFPGSLFAQFVWPIFGGASVIGIAMGILLRHVSTAQIRLAITLWLQALGILVAEVVPGISGLVIGAFLVGGGFMCVVQLALLYGRELAPSHTHYMAGLLTTGYALGQLVGPMLSAISTWLTGKLEPALYVAFIGLVIA

SEQ ID NO: 4764 - protein, 112 aa, Xenorhabdus sp.
VDSTLGIAEGIETALSCKQIYGVNTWSTMNAGYMAKFIAPQGVKHLIVFADNDWSATGHAAAMECARKNLQANNDVEKVSVRWPDAGDFNDLLQNGDQARGIEFTRKTAETA

SEQ ID NO: 4765 - protein, 139 aa, Xenorhabdus sp.
MRDIQMVLERWGAWAADNSDGVYWSSIAAGFKGLIPNRVKSRPQCCDDDALIISSCMARLNKNNNEAHDLLFDYYVFGKTFMQLAQDHECSDGHIGKKLQKAEGVIEGMLMMLDVALEMDKCVQLAPQSISTHQLCSNF

SEQ ID NO: 4766 - protein, 156 aa, Xenorhabdus sp.
LPTNTGIFSVSRLNQTVRQLLELEMGKIWLSAEISNFSQPSSGHWYFTLKDERAQIRAAMFRSYNLRATFRPQNGQQVLVKAQITLYEPRGDYQLIVESIQPAGDGLLQQQFEVLKQKLTAEGLFEQIYKKPLPSPAKRLGVITSASGAALHDILN

SEQ ID NO: 4767 - protein, 147 aa, Xenorhabdus sp.
MIRKFLREDMDTVLKIWLEASIKAHHFVAADFWQSQIENMRNIYIPASEVYVYTQNQKVIGFYALHNDILAAIFVSPDSQGQGVGKKLIMDAKSRRTELSLSVYQENKSSYNFYLSQGFYVAEEGKDEVTGHSEYVMHFRKLNTPAI

SEQ ID NO: 4768 - protein, 59 aa, Xenorhabdus sp.
METKDLIVIGGGINGAGIAADAAGRGLSVLLLEGQDLASATSSASSKLIHGGLRYLEHL

SEQ ID NO: 4769 - protein, 252 aa, Xenorhabdus sp.
LKQTQRHDAIIELVRLQGYVSTEELVEHFDVSPQTIRRDLNELADKNKIQRHHGGAALPSSSVNTAYHDRKIMWSDEKARIAKQVATQIPNGATLFIDIGTTPEAVAHALLNHQDLRIVTNNLNVATLLMGKEDFRLILAGGEVRSRDGGIIGEATLDFISQFRLDFGILGISGIDSDGSLLEFDYHEVRTKRAIIENSRCVMLVADHSKFGRSAMVNLGNMNLIDFLFTDKEPPSGLQKIIEQHSVKLELC

SEQ ID NO: 4770 - protein, 37 aa, Xenorhabdus sp.
VGHVTLVTSSASWLYKKLGFKPVTEQDFVWTLEKRQK

SEQ ID NO: 4771 - protein, 197 aa, Xenorhabdus sp.
GLHKLASGDLTVTIGRPLDGELDQLRQDFNASMLHLQATMRQIRDNVEMIQGNGNQMAEAAEDLAKRTEQQAASLEETAAAVDEITVTVRSSAERAKDADQIVRQAKQSADDSAIVVNNAIDAMGRIEEASRQIEQIIGVIDEIAFQTNLLALNAGVEAARAGEAGKGFAVVAQEVRELAQRSATAAKEIKSLIFRA

SEQ ID NO: 4772 - protein, 143 aa, Xenorhabdus sp.
RLYTSLRGRDKSAQPVGGESFKAGFVEAMNDDFNTPEAYSVLFDIAREINRLKADDMAAANGLAAELRKLAGVLGLLEQEPEQFLQGGVDDDGDVAQIEALIKQRNDARKNRDWALADSARDQLNAMGIELEDGPQGTTWRRK

SEQ ID NO: 4773 - protein, 236 aa, Xenorhabdus sp.
KYGVELQIGGSNQWGNITSGIDLTRRLHQKQVFGLTVPLITKSDGTKFGKTEGGAVWLDPKKTSPYKFYQFWINTADADVYRFLKFFTFMDIEEINSLEEEDKNSGKAPRAQYVLAEEVTKLVHGEAGLTAAKRITESLFSGAVADLTEDDFAQLAQDGMPAIELENGADLQQALITAEFVPSRGQARTMISSNAVSVNGEKQSEAMYVFADEDRLFGRYTLLRRGKKHYCLIDWK

SEQ ID NO: 4774 - protein, 152 aa, Xenorhabdus sp.
MSLNDIILIASILLAFAFAIYDEFSIHYFKGKTLLTIKLKRKHRIDALIFIILVSIVIYNNVVAQGSPLTTYLLSFIILISIYFGYIRSPKLIFKKEGFYYFNRLFYYEKIKAINLSEDGILMIEFEAKKIYIAVTKLDDLEKIYKFLLSNK

SEQ ID NO: 4775 - protein, 95 aa, Xenorhabdus sp.
DSRWYVSSLPLDAETAAKAIRRHWAVENELHWVLDVAFREDNISLKDPDGAAQMALFNRIALNVIKQNTSIKDSQAAKRRRATWSGEFRSQLIFD

SEQ ID NO: 4776 - protein, 30 aa, Xenorhabdus sp.
MARVLGVVIAVFLAWRKVPLIVVTLEHHWL

SEQ ID NO: 4777 - protein, 161 aa, Xenorhabdus sp.
MFIGIIASGGNPLAAAAAGLLVNARHLPFGVAVRELVGKGTAKFFGCHIMNDESVVFGMSQSTPEQRKAAYWFCGIGVALFWPLGVLIGGTVGKFIPAPETIGLDAVFPTILLAMVIPAFKNRTSLIRASSGAALSLSVVPFIPVGLPVLLSLLGLFARKK

SEQ ID NO: 4778 - protein, 188 aa, Xenorhabdus sp.
LDEALSGCELVFGTSARSRTLSWPMVEPRECGERCVSAVQNSPVAIVFGRERVGLTNEELQKCHYHLYIPTNPEYGSLNLAMAVQLVSYEIRMAYLALTAQEKQEKADATEHEVEYPPVEDMERFYQHLEQVLSHSGFIRKAHPGQIMNRLRRLYTRARPETQELNILRGILTSMEKWANKSSESGRK

SEQ ID NO: 4779 - protein, 158 aa, Xenorhabdus sp.
MRLTSKGRYAVTAMLDVALHSQEGPVPLADISERQGISLSYLEQLFSRLRKNGLVSSVRGPGGGYLLGRDAGKIFVAEVISAVDESVDATRCQGKEGCQGGDRCLTHTLWRDLSERITSFLNSISLEELVNNQEVLDVADRQDSDKRRTANGPGFKND

SEQ ID NO: 4780 - protein, 399 aa, Xenorhabdus sp.
RTMCSKTSSDDEPFSALAFKIATDPFVGNLTFFRVYSGVVNSGDTVLNPVKDKKERFGRIVQMHANKREEIKEVRAGDIAAAIGLKDVTTGDTLCDMSSPIILERMEFPEPVISVAIEPKTKADQEKMGIALGRLAQEDPSFRVSSDEESGQTIIAGMGELHLDVLVDRMRREFNVEANVGKPQVAYRETIRASVEQEGKHAKQSGGRGQYGHVWLRIEPMEAGGAGYEFANEIVGGVVPKEYIPGVDKGVQEQLKSGVLAGYPIVDVKVALFDGSYHDVDSSEIAFKIAASMAFKEGFMKAKPVLLEPIMKVEVETPEDYMGDVIGDLNRRRGMIDGMDDVATGKIVRAQVPLSEMFGYATDLRSQTQGRASYSMEFLKYNEAPSNVAQAIIEARKAR

SEQ ID NO: 4781 - protein, 172 aa, Xenorhabdus sp.
MFKKQESYTKEELQASGQGKLFGENGPPLPSGNMLMMDRIIKMTEDGGTYNKGYIEAELDINPDLWFFGCHFFKDPVMPGCLGLDAMWQLVGFFMGWLGGEGKGRALGVGEVKFTGQVLPTAKMVTYRINFKRVINRKLIMGLADGEVLVDGKLIYTATDLKVGIFKDTSNF

SEQ ID NO: 4782 - protein, 107 aa, Xenorhabdus sp.
PIGGVNEKIEGFFRVCHCRGLTGSQGVIIPAANVQHLCLHQDVINAVKNGEFHIWAVEHVSEAASLLTDIPYYDEQKEHLLAMIYERITQVNSQERPKLPWFLRWLG

SEQ ID NO: 4783 - protein, 200 aa, Xenorhabdus sp.
KINAGQLVRLLNIPMERAKELHGLENGKAHADALKQGCREHHGAAGRKWIDYLSSHQKEARQTYLDAQARWSKLIPESYGEQVQRVSDRFAALEAAMILGRVVTGWDERECQDALQYIFNVWVAEFGTGNKELEQIVEQAVSFLNAYGMSRYAPLPYDERDLPIRDLAGYREKKGIHDDAPITFYTLPATFKQEISRGFN

SEQ ID NO: 4784 - protein, 66 aa, Xenorhabdus sp.
SSAHTKWLCKYHIVFSSKYRRKVIFNNIRSSVGEILRDLCKYKGVEIIEGHLMPDHVHMLVSIPPL

SEQ ID NO: 4785 - protein, 271 aa, Xenorhabdus sp.
SRAGLSDPNRPIGSFMFLGPTGVGKTELCKALANFLFDSDDAMVRIDMSEFMEKHSVSRLVGAPPGYIGYEEGGYLTEAVRRRPYSVILLDEVEKAHPDVFNILLQVLDDGRLTDGQGRTVDFRNTVVIMTSNLGSDMIQERFGVLDYAGMKDMVMEIVGHHFRPEFINRIDEVVVFHPLGKEHLKAITSIQLQRLYKRLEERGYQVTITSSALEKLSETGFDPVYGARPLKRAIQQEIENPLAQQILSGALIPGKLVTLDLENDHIIAKQ

SEQ ID NO: 4786 - protein, 95 aa, Xenorhabdus sp.
MHDNALWLTPESEQKIAINQWLEKTVVQLPVWKKMGVNDVRHLFLQRSGELNELNGLINIHIKPEVYDVLISEWPWPINIAHFSWLKYPITITWL

SEQ ID NO: 4787 - protein, 38 aa, Xenorhabdus sp.
MTWEYALIGLIVGFIIGALAVRFGSRKLRQQNAAQAEL

SEQ ID NO: 4788 - protein, 451 aa, Xenorhabdus sp.
ARAMCSKVPDLAASYFAPLSASPWAMLLHSGAAQHSHNRFDIIVAEPIITLVTQGSSTGIKSHDAVSHSQEDPFLLLKKHLNDCNITPQFDPDLPFQGGALGIWGYDLGRWTEKLPATTINELNFPDMAIGIYDWCLIIDHHQQKATLLSYHDIDTRLAWLEAHAQHRETNFALTSAWQSNMSEQQYHEKIAHIHRYLRNGDCYQVNLAQRFRANYQGDEWQAFRQLNESNRAPFSAFIRLPENCVISVSPERFLLLEDNKIQTRPIKGTLPREQDPEKDRLQAEKLAKSRKDRAENLMIVDLLRNDIGRVAEAGSVKVPELFVVEPFPAVHHLVSTITATLPDEYHATDLLRACFPGGSITGAPKIRAMEIIEELEPHRRHGYCGAIGYISFCGTMDSNITIRTLLTEKGKMYCWAGGGIVADSTAEKEYQETFDKLGHILPKLRELHTS

SEQ ID NO: 4789 - protein, 302 aa, Xenorhabdus sp.
LFSCWWFCLWVIAYYFINDLELAILFFPFALRLGIALHIPRKYWPTLYGTEWLLTIGLALLMKQPQWLTVLTASIVSLPIVWAACRYYCGNQWQRLAVIALVIVITSIVNVISVINHNPAVTIALLVSLTGGVMLVPLCYLVWHYLFQNVWLPMTANVITHQIRFNLKQVIFYSLLFILNIFLQIWIPNELRYFAPFCLAIPIILLAFRYGWQGALLGTLLNSVALIAARSGVSDMEITDLLLSLLTQTLTGIILGMAVHRQRDLNMQLKRELSRNHSLSRQLVKAEESVTREIASELHDEI

SEQ ID NO: 4790 - protein, 309 aa, Xenorhabdus sp.
LNTIPKIRHTTSHQDPADLRQHLIDEIRRFEVACQQVNQPYEVIIGARYCLCTALDEAAALTPWGSRSVWSGSGLLVTFHNETWGGEKFFQLLAKLSQNPKENLFLLELINFCLQLGFEGRYRIMDNGRSQLETLKQRLYQLIHSIRGNYPAELSPNLQLLKKPNKAWKPFLPMWVCLLFLCFLGCILYISLNWRLGNITTPVLSSIYQTSLPNVPDRKISLPPPPAPVKKEKPNLRSRLQAEISAGLLTVSVNDKNVITLEGDGVFRSGSSRIKKNYLYVIKRIAEEMNHYKGEILVVGYTDNVPTYT

SEQ ID NO: 4791 - protein, 107 aa, Xenorhabdus sp.
LKDKGYLSQELANDLAQNGVTFITKKRSNIKASVLEDWDKIMLSRRFIIETVNGQLKNICQIEHSRHRSIKGFLLTVLTGLIAYCHKKKKPSLKVFYSEEEDIPVTA

SEQ ID NO: 4792 - protein, 257 aa, Xenorhabdus sp.
MKRIPEPFRIKMVENIRMTTRTEREVALKAAGYNPFMLPSDMVYIDLLTDSGTGSMSNQQWAGMMMGDEAYAGSRSYYHLVDKVKELIGYEHTVPTHQGRGAEQILFPALIERKKLKGGAQNPVFISNFHFDTTMAHVELNHAKAINVVTDKAFDTGSYYDWKGDFDIDLLQHTIKEQGENNVVAIIVTITCNSTGGQPVSLANMKAVYEIAKQYDIPVVIDSARFCENAWFIKQREQGYADKSIKEIVREMYQYGD

SEQ ID NO: 4793 - protein, 153 aa, Xenorhabdus sp.
DIVWGLIAALLIANILLLIMNIPMIGLFTRMLSIPLWFLVPVIASISAVGVYAVHSTTFDLMLMVGLGVFGYILRKMNFPMSPLILGFVLGEMLEQNLRRALSISNGSFDILWSSAITQSLLVLAALVLIIPPTLRIIRKKRQKSRKIYSQST

SEQ ID NO: 4794 - protein, 392 aa, Xenorhabdus sp.
KGIGNNQKEVLKSLKEGLSGITFSEEFKEMGLRSQVWGNIKLDTTGLIDRKTQRFMSDASVYAYLAMDEAIKDSGLSDDQVSNLRTGLVVGSGGGSPHNQVVCADGMRARGLRGVGPYMVTRTMASGISACLATPFKIKGVNYSISSACSTSAHCIGHAVELIQLGKQDVIFAGGGEELSWEIACEFDAMGALSTKYNETPDRASRTYDQNRDGFVIAGGGGIVVVEELEHALARGAHIYAEVIGYGANSDGMDMVAPSGEGAVRCMRMAMDGIDGEVDYINTHGTSTPVGDLKELEAIREVFGDNTPAISATKAMTGHSLGAAGAQEAIYSLLMLEHGIIAPSINIEELDEKALGMNIITEPTERELTTVMSNSFGFGGTNASLVMRKYSD

SEQ ID NO: 4795 - protein, 131 aa, Xenorhabdus sp.
VMSQGLSELSAKANWVLIEGAGGWYTPLSENNTFADWVIQEKLPVILTVGVKLGCINHAALTAKAIQDSGLKLAGWVANEIEPPGRRQAEYLATLKRMMPVHLLGVIPHMSGLEVERHEIGKYINIDLLVN

SEQ ID NO: 4796 - protein, 95 aa, Xenorhabdus sp.
SGAFVPGIRPGEQTAKYIDKVMTRLTLVGALYITFICLIPEFMRDAMKVPFYFGGTSLLIVVVVIMDFMAQVQTLMMSSQYESALKKANLKGYNR

SEQ ID NO: 4797 - protein, 37 aa, Xenorhabdus sp.
MKSESLVIVDQNATVNTFPGLVHTARHTMGVGCKRSR

SEQ ID NO: 4798 - protein, 118 aa, Xenorhabdus sp.
HARPFVEGVGYNFLAHAPTASFPSNHGTAVFTFSLAFLFWHRIWSGLCLMVIACAIVWARVYVGVHWPIDMIGAFLVSLMGCAFSQIFWHLYGSFLQNKLTFLYQFFCSFLIKRGWVQ

SEQ ID NO: 4799 - protein, 517 aa, Xenorhabdus sp.
QCALKIPGVQKVSRSGGTSREILVEPDPVKLAALKISVADINRLLLQSNVNIPGGKMVIAGQNHAIRILGAKNQIDYLRQLKFPLDNNNWVTLGDIATIKDSHAETNTIARLNGEPVIGFAIFRTKGSSDTVVEKGVTQALKKIEKEYPDINIKLVSSNVKYTVASYNATMQTLIEGAILTVIVVFFFLKSWRATLIAAIALPLSILPTFIILHLFGYTLNSITLLALTLVIGILVDDAIVEIENIEKYIERGERPYIAAIKASNAIGFAIIAITITIVAVFLPVSFVGGFVGQYFVPFGVTVSAAVLSSLLVARLVTPLMSAYLLLPKKASAKKALSEKHSEADKVRTPEWINKYVTILDKTLRFRKTALALSLVFLFGSLSLLELLPSGFLPKSDISIAKVDIEVPPGTQVAKSDELLQKIIKQFKDRPEIVDIFSIAGVEGTAGDISQSKSTIIINLVPINDRKLSQKEFEESLAPILSATPDIRYNFGSGSGNRDVSIVLASDYPDILSQTIQ

SEQ ID NO: 4800 - protein, 216 aa, Xenorhabdus sp.
MATIKDVAKRAGVSTTTVSHVINKTRFVAEDTKAAVWAAIKELNYSPSAVARSLKVNHTKSIGLLATSSEAPYFAEIIESVENSCYSKGYTLILCNSHNNLDKQKAYLAMLAQKRVDGLLVMCSEYPQQLLGMLEDYRNIPMVVMDWGESRGDFTDAIIDNAFHGGYLAGRYLIERGHRDIASIPGPLARNTGGGRHQGFLKALKEANITIRDEWV

SEQ ID NO: 4801 - protein, 128 aa, Xenorhabdus sp.
VMSWLFSLLLEYLGMTFFWPDEGAAHSQTMMKTELQFLSTEFTRSLLLSEPSQTVSDWLMQAYQWLFVDSGFLHWIQGQHQYQLNSRNDFIREFNGVLQDISGYLREYALATVFITMVTLIRLAILVL

SEQ ID NO: 4802 - protein, 249 aa, Xenorhabdus sp.
PFFDWEQVIRKNGIVYIGLDALSDSDVASAVGNSMFADLVSVAGQIYKYGMNAGLPVRYDGKLAINLHCDEFNELMGDEFIPLINKGGGAGMQVTAYTQTSSDIEARIGSPAKTAQVIGNFNTLIMLRVRDNRTAELLTSQLPEVEIYSKTLVSGHSDIADVEQGQDFTSSTQDRVGTVKTPLVTPAEMINLPKGQAFALLEGGQLWKIRMPLPTGDDDDALMPTSLQNIAEHMRRHYRTSENWWEEKG

SEQ ID NO: 4803 - protein, 72 aa, Xenorhabdus sp.
CSKDIYRKDEDPQTYNENIGPWDRFYQYQIPFFIDERQYILRQDQSENYWRITEINVPELMIGEDTDTSDNH

SEQ ID NO: 4804 - protein, 453 aa, Xenorhabdus sp.
SKGTLFSNAVLPWLNILGTTLALLGIWVIGFTLFTGWSWLTIAEKIGACILDSISFVLNRSRPESEYDEEQDELALEKEAVSASSGTEEESGHNGNKPATTDIMQNSGTVDEDDALLATPTVTELANIDSKQPESEESEESLSPVSISSESIASESASSEPLVSIVPETAQVISEQAENIQEAEPTRYTFELSGDERIRNITAEFSNASHTVPESDLSPANIHSATVDTAQDILAVSPSPDNDDELQLPATTSAVSVRNPQVKQGIGPEMPRPNPVRIPTRRELYGVKVPSHRLAEHLQRKEKERQEELNAEAEEQKMDAQQQDMLRQQFLDQQRERYGSDVEKEPKENAELSNYAQNETILDSTYDDTAVEAPVERPISNVDEQAEQEDMLREAFEQQQSERYQNQTTAFQQPEKSVFEYLSQIDSSDKSEPTEPLFMPSEFIPGEDIAQPE

SEQ ID NO: 4805 - protein, 123 aa, Xenorhabdus sp.
MCSKDDAQLTHFKLILEAWRNQLRDEVDRTVSHMQDEAANFPDPVDRAAQEEEFSLELRNRDRERKLIKKIEKTLKKVEDDDFGFCESCGVEIGIRRLEARPTADLCIDCKTLAEIREKQMAG

SEQ ID NO: 4806 - protein, 230 aa, Xenorhabdus sp.
YVGRFAPSPSGDLHFGSLVTALGSYLQARAHHGKWLMRIDDIDPPREIPGSADRIQRSLEHYGLHWDGEVLYQSQRHEAYRAILTQLQQQGNSYYCTCTRQRIHQLGGFYDAHCQHLQLPAHNAAIRLKQDHPVYDFYDKLQGNITVPVKMAEEDFIIHRKDGLFAYNLVVVIDDNYQGITEIVRRADLIEPTVRQISLYRYLNFTTPDYVHLPLVLNKEGNKLSKQNMQ

SEQ ID NO: 4807 - protein, 107 aa, Xenorhabdus sp.
LIPDVSKALSWLEANPAVLDGICRGIERETLRVTPDGHLAMTKHPESLGASLTHKWITTDFAESLLEFITPVDSDIKRTIDFLKDLHRYTAKNLVNEKNWPLSMPCF

SEQ ID NO: 4808 - protein, 186 aa, Xenorhabdus sp.
KCKGDGYGLATTYDVGYGINVGASYANSTRAAIQWKTDALGKRAEAWNIGAKYDANNVYLAAMYGETRNMTPGTAFTKHDNLKDGIANKTQNIELVAQYLFADYGLKPSLAYVQSKGKDLKRNHHNADEGFNADLVKYVSVGTYYYFNKNLSTYVDYKINLLDKNNSGEANPNARNVFGVGLTYQF

SEQ ID NO: 4809 - protein, 68 aa, Xenorhabdus sp.
MTESFAQLFEESLQTIETRPGAIVRGVVVAIDKDVVLVDAGLKSESAIPVEQFKNAQGELEIQVGDEI

SEQ ID NO: 4810 - protein, 228 aa, Xenorhabdus sp.
MTIIAPVITVDGPSGAGKGTLCQALAEALNWQLLDSGAIYRVLALAAIHHQVDIKSEDALVPLAANLDVRFVPANGRLRVILEGEDVSNEIRTEAVGNTASQTATFPRVREALLRRQRAFRLLPGLIADGRDMGTVVFPDAPVKIFLDASAEERARRRMLQLQENGFSVNFESLLSEIQERDFRDRNRAVAPLVPAQDALILDSTSMSIEEVIDKALNYARNTLALTV

SEQ ID NO: 4811 - protein, 96 aa, Xenorhabdus sp.
NFYRGGVKEFDCFNARPPNLGKVGVEVEEGHDHIRIVPPAKFTHAEIETYNDHRVAMCFSLVALSDTPVTILDPGCTAKTFPDYFKQLKSISDTPS

SEQ ID NO: 4812 - protein, 236 aa, Xenorhabdus sp.
MDSQRNLLLIALLFVSFLVWQAWENDKNPQPTVQVSQQTNTLSNEAVSGQGKLITVKTDVLSLHINTRGGDIEEADLLAYPDTLGSKMPFKLLETTPEFTYQAQSGLTGTNGPDNQAERPLYTAAQNNYVLAEGQDELRIPMTYIAPDGVVYVKTFVLKRGNYAVSVDYSIDNVTDKPLQMAFFGQLKQSVDLPKHRDTGSSNFALHTYRGAAYSSDQEKYEKYKFDEIESKPLSV

SEQ ID NO: 4813 - protein, 86 aa, Xenorhabdus sp.
MASSLSLGSLLLIATIRRYHIVISPLLGPFRRWNPTCSQYGIDALRRFGMMKGSWLTVKRILKCHPLHEGGDDPVPPKKNEDNREH

SEQ ID NO: 4814 - protein, 313 aa, Xenorhabdus sp.
MSNGVVTAAYIVAAILFIFSLAGLSRHESSRRGNIFGIIGMAIALIATILGPDTGKVGWLILAMIIGAVIGIRLAKKVEMTEMPELVAILHSFVGLAAVLVGFNSFIAHDIFADAIMENIHLTEVFLGIFIGAITFTGSVVAFGKLRGKISSKPLMLPHRHKLNLAALIVSFVLMVIFIKTESAGLQVFVMLAMTAIALAFGWHLVASIGGADMPVVISMLNSYSGWAAAAAGFMLSNDLLIVTGALVGSSGAILSYIMCKAMNRSFISVIAGGFGSDGVSTGDDQEMGEYRETTAQEVAELLRNSTSVIITL

SEQ ID NO: 4815 - protein, 245 aa, Xenorhabdus sp.
KLITREMVESMKPGSVIVDLAAQNGGNCELQEADKLVVTDNGVKIIGYTDLPSRLPTQSSQLYSTNLVNLMKLLCKEKNGEIAIDFDDVVIRGVTVIKEGEITWPAPPIQVSVQPPKPEPVRKEDKPVEKPKSPWMKYGLLALAMILFGWLANVAPKEFLSHFTVFALSCVVGYYVVWNVSHSLHTPLMSVTNAISGIIVVGAVLQIGEGGWISFFSFIAVLISSINIFGGFTVTQRMLKMFRKG

SEQ ID NO: 4816 - protein, 330 aa, Xenorhabdus sp.
LGTYLMTQPVFIITIDTEGDNFWQTSDKISTQNTQYLPRFQNLCERFGFKPVWLTNYEMAMDDSYIEFAKDVIVRNTGEIGMHLHAWNSPPIVPLTNNDMHYKPYLIEYPKDQIKAKIELMTNLLEEKLQTKMVSHRAGRWAFNEYYAQLLVEYGYQIDCSVTPKVNWNFTTGDPNGNGGTDYSHFPSHAYFMDLQDISKEGDSALLQVPMSIQYKHSLFMNFIKQKYDSLRGKQRSPSVNWLRPKGGNLEQMKAVVQQTLVSGSDYVEFMLHSSEFMSGGSPTFKNEEQIELLYQDLEGLFEFLKPLIQGMTLSEYYQLRLSTKNIDFK

SEQ ID NO: 4817 - protein, 63 aa, Xenorhabdus sp.
VTGSLNAAFAQWLIPHGKLPANYTARQGRCIERDGWIYITSDEDGIWVSGDVVDCISGMVEFD

SEQ ID NO: 4818 - protein, 53 aa, Xenorhabdus sp.
RPMLSDPVWDKLFVFMQQNRLTYHKKTHRLIMEGILFRMRTGIPWRELPAEYG

SEQ ID NO: 4819 - protein, 83 aa, Xenorhabdus sp.
PLSIEFMAKEQTDRTTLDLFADERRPGRPKTSPLSRDEQLRINKRNQLRRDKVKGLRRVELKLNEDAVDALNHLAKQRNISRL

SEQ ID NO: 4820 - protein, 196 aa, Xenorhabdus sp.
VKKQTEKQREKRKHILDAAISCFIEKGFHATSTAEICKAAGMSPGNLFHYYPTKNAIIEAIAEEDSHDYDEILAACYDENSVTMTIEKLLAKLVELYNEPGYARLSIEIIAEASRNPAINKIFIENEKKVREHLTRLISKGIENGEIDKQINAEQAASWLMITVDGSIGRQIMEPDFAWQQSLDSFTYMIRKVFMP

SEQ ID NO: 4821 - protein, 144 aa, Xenorhabdus sp.
MTKKYPSQEMDRFNVRMPAGMRDEITKIAEKNGRSMNTEIVMMLQEGIDRINGIPSQSESESESEADGNKVYHIKSRLNPDKFYTIEISQDELEEAYKAAVYSSILRDLIKRNNETEFDELREMISETFEEKLAKRNDRFNKKP

SEQ ID NO: 4822 - protein, 33 aa, Xenorhabdus sp.
MKDALYTERATETFSLRLPKRVKEHVMSVLARA

SEQ ID NO: 4823 - protein, 65 aa, Xenorhabdus sp.
VVDVFRNATAAYGIAEEAIAIRAKVLWLQKGVINDEAKLLAENKGLDVIMDRCPKIEIPRLGLEK

SEQ ID NO: 4824 - protein, 116 aa, Xenorhabdus sp.
SDCKVSLEVTMMIASKFGIGQQVRHSLLGYLGVVVDIDAEYSLEQPQENDIASNATLRSAPWYHVVMEGDDGQPVHTYLAEAQLTYEISDDHPEHPSLDELAESIRSQLLAPRLRN

SEQ ID NO: 4825 - protein, 42 aa, Xenorhabdus sp.
KAISQKHGEEKGNSRYLYRLFPKGPAKQATKIAGLPKPVKCI

SEQ ID NO: 4826 - protein, 300 aa, Xenorhabdus sp.
AWTVDENGSLKTLTWGMSRRETRVYTREGDIFKETKEFQKGEWVNSVIKGSVNGNFTGSALAAGLTSSEARDVTKALQWQIDFRKLRKGDQFSVLLSREMLGGKSEQSQLLGVRLRSGGNDYYAFRADDGRFYDSNASGLERGFLRFPTTKQFRVSSPFNPRRLNPVTGRVTAHRGVDFAMPVGTPVLAVGDGEVIVAKFDGAAGNFIAIRHGRQYTTRYMHLRKLLVKPGQKVKRGERIGLSGNTGRTTGPHLHFEFWDNQQPVNPLTAKLPRSGGLSGKDRSEYIAMVKELKPQLSLN

SEQ ID NO: 4827 - protein, 101 aa, Xenorhabdus sp.
YIPTFHLSYLHPRYWGIWAGVGILAGLAYIPAKWRDPLLAKIGVFAGRKAKSARRRAKINLLYCFPELSEPQPEILIDKMFPTEPQLFCFALAELCLKGVE

SEQ ID NO: 4828 - protein, 346 aa, Xenorhabdus sp.
MISGILVSPGIAFGKALLLKEDPIIINHKKITPEQVEQEISCFKQGRDKASAQLEVIKNTAEKNLGAEKAEIFEGHIMLLEDEELEQEIITLIKKNLATADAAVHSVIEDQAKALEELDDEYLKERAADVRDIGKRLLKNILGMPIIDLGSIAEEVILVANDLTPSETAQLNLDKVLGFITDLGGRTSHTSIMARSLELPAIVGTTNATTQIKNGSYLILDAVNNHIYIDPSDTEIEQLKKIKNEYLSEKTELAKLKDLPAITLDGHQVEVCANIGTVRDIAGAERNGAEGVGLYRTEFLFMDRDSLPTEEEQFEAYKAVAESVGNQAVIIRTMDIGGDKELPYMN

SEQ ID NO: 4829 - protein, 85 aa, Xenorhabdus sp.
MFQQEVTITAPNGLHTRPAAQFVKEAKGFSSDITLTSGGKSASAKSLFKLQTLGLTQGTVVTISAEGEDEQQAGEHLVKLMGELE

SEQ ID NO: 4830 - protein, 333 aa, Xenorhabdus sp.
MNTVTEKKVLLEVDDLKVYFDIKDGKQWFWQPSKELKAVDGVTLRLYEGETLGVVGESGCGKSTLARAIIGLVKASGGSVTWLGQNLFDLNDKQWRDIRNDIQMIFQDPLASLNPRMTIGDIIAEPLKTYYPKMKDVEIKEKVKKMMMKVGLLPNLINRYPHEFSGGQCQRIGIARALILEPKLIICDEPVSALDVSIQAQVVNLLQDLQREMGLSLIFIAHDLSIVKHISDRVLVMYLGNAVELGTYDEVYHNPLHPYTRALMSAVPIPDPDKERYKQIELLEGELPSPINPPSGCVFRTRCPMADAECAKTRPLLEGSFKHAVSCLKVDPL

SEQ ID NO: 4831 - protein, 243 aa, Xenorhabdus sp.
VVRAEVRIEITEGVDSARPIGVVPFKWTGADNPPEAIGSIVAADLRNSGKFNPITSDRMPQQPTTASEVTPAAWSALGIDSVVVGQVQPVADGKYLVSYQLVDVVGTPGSVLAQNQFQVDKKWLRYAAHTVSNEVFEKLTGIKGAFATRIAYVVKKTATDKYPYELRVADYDGYNENIVHRSPAPLMSPAWSPDSSQLAYVTFEGGHSSLVIQTLATGAVRQIASFPRHNGAPAFSPDGTKLL

SEQ ID NO: 4832 - protein, 223 aa, Xenorhabdus sp.
QKIAEEAAAKAKAEQERILKEQEEARQKAEAQARKEAEEAAKRKAEAEAKAKAEAEAKAKAEAEAKAKAAAEEKAKAEAAAKAKAEAKAKAKAKAEEAKQAQTVDDLLGGLTSDTPKPGGASAAGKGGGKKSGASESDINNYKGQIRAAIQGKFLDPSLFLGRTCDLTIKLAPDGMLISIHANGGDPALCQAAIAAANQTKMPRPPSKEVYEHFKSFSLDFKP

SEQ ID NO: 4833 - protein, 142 aa, Xenorhabdus sp.
AIGKSRGGRSTKIHLAVDSYGLPVHFELSEGQTHDMVHAESLVAQSPPADFVVADKGYDSQALRTYIEEQGATAVIPYRKNSRNSDKKWDKDLYRYRHLVENAFARIKHFRAIATRYDKLARNYASTLALAFIIIWLPMWVE

SEQ ID NO: 4834 - protein, 147 aa, Xenorhabdus sp.
RVSLVQSFPNIYQQLKIVNAEIDKSAVSVGIREGFCHLLKLRISQINGCAYCVRLHTRDALQQNESIDKVAVLPAWKETEYFTEKERAALLLVEAITEIQNDHIPDDVYQKAATVWSDKQVAAIEWLAIMMNALNRLGIAGRYHVAP

SEQ ID NO: 4835 - protein, 180 aa, Xenorhabdus sp.
GASAMFTFYTYIVPMLMTLSHVAETQVSIMLVLVGVGFTVGNYIGGILANRSVSKTLYGLFASLFLIMMLFPQIAKDTITGGIILVFWGAASFGVVPPLQLKVMQVASEAQSLASSVNIGAFNLGNAIGAALGATVLSLGLGYEMVSYSGGFVALVGLLLLLITDQKTQSLTLSINKRKG

SEQ ID NO: 4836 - protein, 41 aa, Xenorhabdus sp.
VCAEILATPDKQKEIESIVCWVSLEKSVSSVSWKIASELPA

SEQ ID NO: 4837 - protein, 436 aa, Xenorhabdus sp.
LTDNGYLITTQINADKFSGDSRVKGAYSLDITPKRAHIVAFDQSGVFYGLQSLFSLIPADGVPKIATLTAQDAPRFEYRGTFLDVGRNFHSKEAVLRLLDQMAAYKLNKFHFHLSDDEGWRLEIPGLPELTEIGSKRCHDLSETKCLLPQLGSGPDSNNMGSGYFSRQDYIDILEYAKARQIEVIPEIDIPAHARAAVVSMEARYKKLMAEGKEQASNEYRLLDPTDTSNTTSAQFYDRHSYLNPCMDSSKRFIDKVISEIADMHKEAGSPLTTWHYGGDEAKNIRLGAGYQDKDGPIEPGKGIINKKIEDKPWAKSQACQKMIAKGIIKDVDELSSYFAVEVSKIVNKYGIDTMQSWQDGLKHAKSAKDFATRHVAVNFWDTLYSGGADSVNDWANKGYQVIISSPDYVYLDMPYEVNPKERGYYWASRFNDEAK

SEQ ID NO: 4838 - protein, 114 aa, Xenorhabdus sp.
VLSFLFFTFQGIAAPIQTVSKLQFGKQWAFTREEVMLDCRSGGALFVINPSTLMQYPLNERAEELVQANQVIATPLSTILLDDPEHNNQKMSIEPFQKAAMSLCDYKSGDKKDK

SEQ ID NO: 4839 - protein, 122 aa, Xenorhabdus sp.
MTDAGNNFYMDIRNGEIYGIYYDPKPIDGVSAWIGCSDPSTDLVTVVSTFPDERTIEKFKVKDSKGDYATYDISPIYKDISNFARGYISSLIKQDAKIKLTYRACGSGGYPTFESAEPIKHS

SEQ ID NO: 4840 - protein, 317 aa, Xenorhabdus sp.
RDDCVAHCANPAFDAATWEIWSALLNGSCLHIVPQTVVLEPIGFREALIRGKVTALWLTAGLFNEYLDTLQPVFGQLRYLLVGGDVLSPQKIKQVLSADHPPAHLINGYGPTESTTFATTYAITAPIDGMQSIPIGRPIANTRIYLLDAHQQPVPMGTLGEIYISGEGVARGYLNQPELTAERFLTDPFSAEPGTRMYKTGDLGRYLPDGNIDYLGRNDFQIKIRGFRIELGEIENALAAHPQIKQAVVIDREHQGHKVLAAYLVAEDAVSDEMLLAHLSDRLPDYMLPASFIFMESIPLTLNGKVDRRTLPEAGFG

SEQ ID NO: 4841 - protein, 40 aa, Xenorhabdus sp.
VQAWKSGVQKYPAVVFDDREVVYGIADVAKARALREQHQP

SEQ ID NO: 4842 - protein, 131 aa, Xenorhabdus sp.
MSNTFDFQINADENVTKAITAMEAQLKSLYPSLRGVREELRFGGSETLDNVGSVSDKLRDMSQFAKDNVQHIGAIIPPLKNVGELTAKYGGLMKKYGGLVGGVGAIGYGATKLYQSMRDAGQEAIARSTRA

SEQ ID NO: 4843 - protein, 92 aa, Xenorhabdus sp.
VQLSKSIESNDGKEIYQEIHLREPFLIEVEQFYDAQAKNPNSSLPAMRLLIALVSNIPESVLKKMAITDFNICREFLLVFLSGNQDSSIGNN

SEQ ID NO: 4844 - protein, 163 aa, Xenorhabdus sp.
MAVILGIDPGSRVTGYGVIRQQGRQLIYLGSGCIRTKVDDLPGRLQRIYAGVAEIITQFQPDAFAIEQVFMAKNADSALKLGQARGVAIVAAVNESIPVFEYAARQVKQTVVGTGAADKSQVQHMVRSMLKLSANPQADAADALAIAITHCHMSQNLLRMGNL

SEQ ID NO: 4845 - protein, 98 aa, Xenorhabdus sp.
CCDETALEAGADDVETYDDGAIDVYTTPESFGEVKDALDAAGFKADSAEVSMIPSTKAELDAETAPKLLRLIDMLEDSDDVQEVYHNGEISDEVAALL

SEQ ID NO: 4846 - protein, 186 aa, Xenorhabdus sp.
PVELLPDIETGASVSHNGCCLTVTKIDGDLISFDLMKETLRLTNLGELKIGDLVNLERAAKFGDEIGGHLMSGHVITTAEIAKIFTSENNHEIWFRIYDKQLMKYILHKGFVGIDGISLTIGDVVNNRFCVHLIPETLERTTLGKKRIGHKVNIEIDPQTQAIVDTVERFMAQKEQEKVLSQLEGN

SEQ ID NO: 4847 - protein, 201 aa, Xenorhabdus sp.
AYAAKHYSVSVTGVTISVEQQKYAQERCKDLDVKIILEDYRDLNLQFDRIVSVGMFEHVGSKNYANYFNVVRRNLKPDGLFLLHTIGSNRDKVNVDAWIGKYIFPNGHLPSIAMIAKASTGKFVMEDWHNFGADYDRTLMAWYERFITNWDKIAHNYSPRFKRMFSYYLNACAGAFRARDIQLWQVMFSPRGIENGLRVPR

SEQ ID NO: 4848 - protein, 256 aa, Xenorhabdus sp.
MTVSYRKSAALFAFVESKAPLYLTTQEGKTAKHLAQLCHVSEDRFHRLLNYMQTLNVLTKKEDKFYLTEQCSTLSDPNSLETLHIKLELNPAIWNAWSQYSTSLNEMSDKSAFEIQNHQSFFAYAGHESNKNFKVTFDDFMSKATESKSDPIIENMPLDGITSFIDIGGGLGALAKDIKTHYPHIQCHVMDLYDFDKKESEGVTLINGDFFADIPSGYDAYCIKNVLHNWPDQKAVDILINCHKAMRKDSVYILSR

SEQ ID NO: 4849 - protein, 535 aa, Xenorhabdus sp.
GEALPPARVNQFRQIFSAFGLHAPALINLYGPTEATVDVSYFEFLPENNSVISRVPIGFPINNITLRIVSQHGTRQPIGIAGELQISGIGLARGYHNKTELTAEKFILDGGERWYRTGDLAKWLPDGSIEYLGRIDNQVKIRGNRIELGEIQNTLERIQGISQAEVLPQVNSNGDTYLCAYYVINLNVINNQHLTSEKLREMLLECLPDFMIPQQFIPVSYIPLTPNGKVDRQALITLVNSSLVKTEVSASYDDAQTETEHQLAEIWQRVLKLEKLSVQDNFYTLGGDSILMLKVRSEAEKAGMNVTLSELSQYLTIAELSQQIEAGRKVKKHVELSPFALIKEKERAALSHYEDAFPATQLQLGLIYHSQQSKHSATYKDVFRYTLKGKWEPETFRQSISAIIQRHPVLRSHFNLADFSEPLQIINHNIRLDDVVEIHDISSLTQDDSETTIKECMEKGRCHNYQFDCAPLYRISLFRTADTIDMVFSFHHAILDGGSVANLIRELFSRYQHDGMYSSETDVLPSPALYIQDEL

SEQ ID NO: 4850 - protein, 393 aa, Xenorhabdus sp.
QSLLEWRRALDESREWIGHLPPFWLCGYLNPLVTSDAVLSQAEATWFTLHDTTAGVQVRSASQTTQPLSVWSVPKQGEHLTHCSQMVWLDQFVQWLNTQFLPLLALPQTGTPVLAPCAMALNFSPLQIVTDNLWLQQLKNTTTLTVPTVADIATQLPFPDVLLTQLPRNSRLTNMEIYTGIAGAMSGVFLLLALLASYGNNRNLLTQIQGDLVLFERLVEEPSEPKTQVWNQLKEDATLLSDWHRRGEPLSHSLGLYQGQKVFLIVQAAIASWAPPTPPEPVESTPPPVMPKAQTVSLDSLALFGVGKSTLKSDATKVLVNALVQIKGKPNQKIVISGYTDNTGNPKFNQQLSLKRAEAVRDWMLQNSDIPAACFAVQGHGADQPVASNETES

SEQ ID NO: 4851 - protein, 537 aa, Xenorhabdus sp.
MKKNNSVKPIVLWVTLLCGLLPATAAIADSGYQEQGQLNSPDSWLSEEFKRQWGLTTIGAHYAYARGYTGKGINVGVLDEAVTPHPEFANKLRRLSPEDPVNFDEDIWTDVIEFGAHGNHVSGTIAANRDGTGMHGVAFDAGLITGKYLQNDYNRTEAMIQSNARVINNSWGVRPQIRRDAYGNPIRRPDGTWDYVKTTLEDVRKYVNNNDLREKLDRLSRSEIPELDDYTTRTAGLLRAARHDKLVVFAAGNANNYNVTWLHAGMPYFFPDVLKNYLSVANITQDKELALSSTSCGYTASYCLSAPGTKIYSSTGKFVSKTGKKIDEGALNRGELEIDSSYDTYTGTSMAAPHVVGAAAVLMQRFPYMTAAQISDVLKTTATDLGEKGIDKLYGWGMLNLKDAINGPKMFITEKDIPAEFYIEDSYTDTQFVANIVGMGEKVEAGTTVERVCDSIECTYDYWSHDISGHGGLTKTGKGMLELTGKNSTYQGPTIVDQGQLQISGGITSEVTVHKGATLSGNGTVGSLIAKSGSLEH

SEQ ID NO: 4852 - protein, 266 aa, Xenorhabdus sp.
PFTDTVSLDEVKAFLSDTGGRWSWEQQLYGHAFSVVSGTYGELADAGERRNNQHETLLGVTKSPTPDYIWAAAITGAVAPSLRNDPGRPLQTLPVAGVLSPAAEHQLDLMDRNNLLHSGISTFTVADDGTVQIENLISTYQKNPYGDNDDSYLQIETLFLLMYVSRYIRTQITSKLGRMKLAKDGTRFAPGSAIVTPNIVRAELIAQYKTLEYNGYVQDSKAFSDGLKVEINAQNPNRLDVLWTGTLINQLRVFALLNQFRLQPTS

SEQ ID NO: 4853 - protein, 63 aa, Xenorhabdus sp.
MGNTTNRLAGTAYVSVNGISIMVVGDFTYSPSTVTRETLTGMDYVHGYKEKPNAPYISCRVRD

SEQ ID NO: 4854 - protein, 117 aa, Xenorhabdus sp.
RPMLSDPVWDKLFVFMQQNRLTYHKKTHRLIMEGILFRMRTGIPWRELPAEYGKWNTVFKRFNVWSKKGVFNSLFNELAKNSDTEWLFIDGSIVRAHQHSSSAASKENEAIGKKPGG

SEQ ID NO: 4855 - protein, 144 aa, Xenorhabdus sp.
ILDWLMEVGSMTRRFEQHCHHVTVTPFRECFITAEELGDESEHLPISEKYWLREIILFGDNIPWLLGRTVIPKETLTGPDKKLVDLGTVPLGRYLFSGNNLTRDYIQIGLQGQRWARRSLLRLSEKPLLLTEVFLPESPAYKIK

SEQ ID NO: 4856 - protein, 207 aa, Xenorhabdus sp.
GAKNDINFPKMHIISLPTPFYPGQAIDDVKMVQALQTGIADLVKAEVNLIVIPCNIAHIYYREIEKASIGIPVLHIADCALQKITPDDTKIAIIGTEPTIEAGFYQARIQAVGKEPVSSAELRNHTTKLIMLIKEKGFEHEEVVAIWDTILSCAQALKVHVLLIACTDISPLIKNKRNQSLKIVDTASSLAEATIHSFYELRGNPKD

SEQ ID NO: 4857 - protein, 89 aa, Xenorhabdus sp.
MNSRAMLVFSGISGFFYVAFGAMGAHLLASVLTPKQLEWIHTGLQYQGLHTLALMALAAVLIRQPVTLFSRAGIFFVAGIILFSGSLYC

SEQ ID NO: 4858 - protein, 171 aa, Xenorhabdus sp.
FGYIGSRWSLSFFVFLFRKYMHIILSISTLYRYFCKQGIVWRRAAPTLKQSDPEYDEKMARITEALSQACKKHPVVYEDEVDIDFNPKIGADWYFKGQQKQIVTPGQNQKYYFAGCLDAQTGKIVSTGGTRKNSDLFINMLKSLKRTYRDAETLSVILDNYGIQGGIPLCL

SEQ ID NO: 4859 - protein, 97 aa, Xenorhabdus sp.
HRNSRWYVSSLPLDAETAGKAIRRHWAVENNLHWVLDVAFREDNISLKDPDGAAQMALFNRIALNVIKQNTSIKDSQAAKRRRATWSGEFRSQLIFD

SEQ ID NO: 4860 - protein, 277 aa, Xenorhabdus sp.
MAATHNGIHYYDVSTRYARISVSDTGGNGLPVLFIHGNSSSKEIFCHQVEYFKKDYRVLALDLPGHGASSNASEPRKAYSMPAYAHTVIEVLEKIGINRVVVFGWSLGGHIGLEMLALFPKMIGLMICGTPPVAAGKDNVALGFRQSEHMGLAGKADFTEEDVKNYAYETVGINAPHDQFILDAVARTDGLSRQYMFEAFTSPQATDQRLLAETSKIPLAIVNGSGDPFINAQYIKGLNYQNLWQDQVISLAGVDHAPFWEAPTRFNPILADFLCDF

SEQ ID NO: 4861 - protein, 92 aa, Xenorhabdus sp.
KRKSIGLRVPSNPIALALLEAMRELLMSCSLILPGNDFAESDPEEIKDALGKQVDLIIHGGYLGQQPTTVVDLTEDSPVVLREGEGDVTPFL

SEQ ID NO: 4862 - protein, 307 aa, Xenorhabdus sp.
MSDKTEKLQKILARSGHGSRREIEGYIQQGRISIDGKIATLGDRIEVKPGTKIRFDGRILNIKESQKTVCRVLAYYKPEGELCTRHDPEGRPTVFDRLPKMQDARWIAVGRLDINTCGLLLFTTDGELANRLMHPSREVEREYAVRVFGEVDNAKLRQLTQGVQLEDGPASFKTISFKGGEGINQWYNVTLTEGRNREVRRLWEAVGVQVSRLIRVRYGDIDLPKGLPRGGWTELGLEQTNYLRQLVELNEETVSKVAVERDQRRLKANQIRRAVRRHAQVASRPAGKRPASSSRQNTGRKTTPKGR

SEQ ID NO: 4863 - protein, 168 aa, Xenorhabdus sp.
  unsure (1)..(168): unsure at all Xaa locations
RYVMVSLAMKKGKQRXASGLSPVPLVMVNVLVSFSSLKEHGKMEKKTCWEKTELSFMLWEPDLPGKPKIGKQILTPCQSVWQHALKLLSDPSIQLIVLDELTYMVSYGYLELREVLTALKQRPASQSVIITGRGCHRELLEFADTVTEMRPVKHAFDAGIKAQRGIDW

SEQ ID NO: 4864 - protein, 100 aa, Xenorhabdus sp.
LEIGSTWYAKSAQRTPINTETKYLLMEYAFEKLGCVAVEIRTHFLNQQSRRAIERLGAKLDGILRNHLRAKNGSIRDTCIYSIILSEWPAIKTHLTWLMA

SEQ ID NO: 4865 - protein, 261 aa, Xenorhabdus sp.
FSSRDLDETRSMVGRVMKPHQLNILGSSRKLHSRMYYIPFGNFSISRLHYGANVEITPGALDSFFLIQMPLSGCASIESGGQYIDSTPNLASVLSPDQHTAMRWNADNDQFMVRISRSLLERTLVGQLGHPLEQPLIFELGFEWQRCQTWRCLMLYLLECTVQVPDILQYKLITTQIEQLLSVTLLSAHQHNYSGDPANHRGSIRPRHVRRVQEYLQAHAHEPITAEQLAQVAGVSLRSLYSGFREFLDISPMQYLRNLRP

SEQ ID NO: 4866 - protein, 38 aa, Xenorhabdus sp.
VGEDYGEGSSIMQERSHAFAMKSQIWLLDPRPYLPFDW

SEQ ID NO: 4867 - protein, 98 aa, Xenorhabdus sp.
MAQGPTGITNAMNILFAGAPAHNLMTIYPMTMGDNAGVNTGVASGTVMGPARHTLGANTLLIKGAPVTRLTSMSMQNSTNSVGCRITPSQTKVLILSA

SEQ ID NO: 4868 - protein, 134 aa, Xenorhabdus sp.
VLAILERPEQQQSAEISVPGDLTIAPQGNLHLNSEGLHIDANDGQCHIKKMQYTGESLSAWVSVTQLIGNKLESVWQTVTQLSHRLFRHTTQTEQVRAGQLDMQAENYLRLHAQHTMMSAKAITKIDAEQIHIG

SEQ ID NO: 4869 - protein, 93 aa, Xenorhabdus sp.
PRLESADFRQSQLTQAIMHKVHAVNAQFTGADMTYADLSYANVSNSDFRTTHFMRTLFHRAEQAGALFSDRNGILENDPELFAAEEWELQRKI

SEQ ID NO: 4870 - protein, 259 aa, Xenorhabdus sp.
MNACKAGINEIILVTHSSKNSIENHFDTSFELEAILERRVKRQLLDEVQSICPSHVTIMQTRQGIAKGLGHAVLCAKPLIGDEPFAVILPDVILDEYSTDLSKYNLSEMLSRFNENGASQILVEPVPYESVSDYGIVDCFGENLQPGDSKPIARVVEKPKPEEAPSNLSIVGRYVLSEKIWPLLAKTAPGAGDEIQLTDAIAMLMEKEPVEAYHLKGRSHDCGNKLGYMQAFVEYGMKHKQLGESFKDWIMTLQNQIEK

SEQ ID NO: 4871 - protein, 143 aa, Xenorhabdus sp.
MKVTVFGIGYVGLVQATVFAEVGHDVLCVDVDAKKVENLKNGQIPIFEPGLEPLVKKNYAQGRMSFTTDAKAGVAHGKLQFIAVGTPPDEDGSADVQYVTAVARTIAENMDSHKVVVDKSTVPVGPADKVRAVMQAVLAVFRA

SEQ ID NO: 4872 - protein, 36 aa, Xenorhabdus sp.
MPDSNVPAIQVQNFFKQVTHDLVETVLRLKATVETY

SEQ ID NO: 4873 - protein, 158 aa, Xenorhabdus sp.
MFTQNEIEALALGASWVVKRADPQLREAAKGVVNKIAAVIPTELKQLLESSSLLVGPAAAATQPVIDISSIRQAIRARRKVTLTYRDLKEQDSERTIWPFALGYFENVSIVIGWCELREEFRHFRSDRILSLHIEKQCYPRSRQSLLKEWREFKKIPH

SEQ ID NO: 4874 - protein, 259 aa, Xenorhabdus sp.
MTDFLTANQIAWDKQAEEQHPWSVPVSSDMVSQAKKGEWQVHLTPKALPKEWLGDISQKRILCLASAGGQQAPILAAAGAEVTVFDLSIKQLEQDRIVAERDELRIETVQGDMRDLSIFADETFDFIFHPISNLYIPDVNPVWQECHRVLKTKGKLLASFFNPVVFVGERNQEHMQQGIIKPLYKMPFSEMDILTPEQITDKNQKQEAFVFGHSLTDLIGGQLRVGFRLIDFYEDWQPHPRFVIDQYLPTFMATRSIKD

SEQ ID NO: 4875 - protein, 166 aa, Xenorhabdus sp.
EPCALKSGNNMQQTLTTQTSRLELTERIITAKLAKNLSWEDIAQGTGLSVTFVTAALLGQHSLPMEAAKKVVEQLGLKDDAVKLLQAIPMRGSIPTGIPTDPTIYRFYEILQVYGTTLKALIHEQFGDGIISAIDFKLDIKKIEDPAGGSRAVITLDGKYLPTKPF

SEQ ID NO: 4876 - protein, 108 aa, Xenorhabdus sp.
MAKLTKRMRTIREKVDATKQYDINEAVALLKELATAKFVESVDVAVNLGIDARKSDQNVRGATVLPHGTGRSVRVAVFTQGANAEAAKAAGAELVGMEDLAEQSKFKR

SEQ ID NO: 4877 - protein, 142 aa, Xenorhabdus sp.
MAKKVQAYVKLQVAAGMANPSPPVGPALGQQGVNIMEFCKAFNAKTESIEKGLPIPVVITVYADRSFTFVTKTPPAAVLLKKAAGVKSGSGKPNKEKVGKVTSAQIREIAETKAADMTGADVDAMMRSIEGTARSMGLVVEG

SEQ ID NO: 4878 - protein, 80 aa, Xenorhabdus sp.
MKLTARQVEASKPKDKPYKLADGGGLYLLVNPNGSRYWRLKYRIAGKEKLLALGVYPAISLAEARTKRNDAKKAIADGND

SEQ ID NO: 4879 - protein, 55 aa, Xenorhabdus sp.
MENVMEKKHLHIAAGIIKNSNNEIFITQRRADSHMGGFWEFPGGKLEQGETPEQA

SEQ ID NO: 4880 - protein, 178 aa, Xenorhabdus sp.
ALKSLVMAGNKWDGMTQEDRDHVKDMLDLRLGFVDFARVHFISALHGSGVGNLFDSILEAYESATRRVNTSMLTRIMRMAEDDHQPPIIRGRRVKMKYAHAGGYNPPIVVIHGNQVTGLPDSYKRYLMNYFRRSLKVMGTPIRIQFKEGANPYAGKKNTLTATQLRKRKRLMEHLKKR

SEQ ID NO: 4881 - protein, 114 aa, Xenorhabdus sp.
  unsure (1)..(114): unsure at all Xaa locations
MNNLVEIFIDVDDFCRFFIPQWEQFCLNKGYRLRRRKGHMYPSEIMTILILFHLSHYRDFKNFYLEHIWRYHHHDFPTLLSYTRFISVASSVLVPLCSYLTQLKGNPTXIAFID

SEQ ID NO: 4882 - protein, 216 aa, Xenorhabdus sp.
MNNLNVIIADDHPIVLFGIRKSLEQIEWINIVGEFENSTTLINSLPHIEADVLITDLSMPGDKYGDGITLIKYIKRHYPTLAIVVLTMNNNPAILSAVLELDIEGIVLKQGAPTDLPKALSALQKGKQFTPESVSKLLEKVNANGYGDKRLSPKESEVLRLFAEGLLVTDIAKKLNRSIKTISSQKKSAMIKLGVDNDIALLNYLSSVTIDNDMVK

SEQ ID NO: 4883 - protein, 255 aa, Xenorhabdus sp.
TKNKYQANTYSPKHAQQKIVLAIHNDCLEKYLYNLLTKAHFQIALYDENKATDSEFLVSDLPIEPNNSDHYHIEISEQHIGEPQNTHNNYWLHNTYQISDFAAFIDNLISDNNYMPMSSASTITTPVKVDDRLNTIRILVVDDHPINRHLLVEQLSSLGLKTAMANDGLDAIEYLKNNETDIILTDVNMPNMDGYEFTKYLRNKGYTKPIIGITANAMAEERQRCADVGMDYCLLKPVSLTKLKETLVAHIRSAT

SEQ ID NO: 4884 - protein, 533 aa, Xenorhabdus sp.
LDPCALKSLLQHVDIREFNQEELHQQLTQWQSGFDYHNGPLWQAAHLIGYADGSARLFFAFHHLIIDAVSWRIIAEDMRLLLQGMALRPKTSSYRQWVAAVHHYAEQHQNEITYWQQVMAGHDVKPAQDNITHHPLSLSVETTNILLHEANTGYHTEINDLLLSALALALQEVFAQPVNHITLEGHGREHIDNTLDVSETVGWFTTLYPVQLQTQSDIAETIIHTKEMLRGIPNKGIGYSALHQAGYLTDDLPAISFNYLGQLGGASHQDWSITSDDCGNAIASENSSHLLLGINGAIQAGRLQFSVDSRLPQSQTTMFITAFEQMLNRVIAIAQAQAQSGGIKTSSDYGIEGLSVRSLNRLQQQYQIEALYPATSLQQGFVYHYLAQPQDDAYRVQWLLDYHTDVDITAYQQAWALASLRFPTLRTAFDWEGKILQVITTEASIGSANFRRKDLTQLSETDCNRVIDEVQQTDRTLPFDLSQPGLVRFTMIQQREQLTTVLVTLHHSIIDGWSTPILLQAVHEYYNAIIQGE

SEQ ID NO: 4885 - protein, 42 aa, Xenorhabdus sp.
MVNVSVPLHRSQGIDVVSFGNSQHDPDCYYLIRAFEDMGELS

SEQ ID NO: 4886 - protein, 530 aa, Xenorhabdus sp.
  unsure (1)..(530): unsure at all Xaa locations
QILADIXHCSRRHVRSLLNNMQQAGWLRWHAEAGRGKRSRLHFLRSGLELQQQRAEKLFEQEDIEELVHLVGDKNTVRQMVLSQLERNFRQGKSTLRIIYYRPFPNLLPGTALRRSEIHLIRQIFNGLTRINEEKEEVEGDLAHHWQQMTEHHWRFYLRPAIYFHHGRELQAKDIINSLEHLKSFPLFSHIKKITSTIPYTVDIFLHQPDTRFDFLMGSPHAMILPQEWKSLPNFAQRPVGTGPYQVVTNNSHKLKIKAFDHYFGFRALLDEVNISIHPELTEKLVCTTLHLGNDGNNNNSLDSRMEEGCYFLLSDQRSAKCARQEVRDWLCSLLTPINLLANCDPFYQRHWSPAYGLLLRWHHSKLLPQRQKPEDITSLTVTFYQQHHEYHTISKILQVILAKYGVELTINIVDYETWFNGDAESDVWLATANFYKPLEFSLFATLYEIPLLKKCLNSDLNSEVSLWRQDKLNVEEWCEKIVDEHRLHPLFHHWLELQGQRSMRGVKMNTFGWFDFKSAWFTPPEGFRA

SEQ ID NO: 4887 - protein, 430 aa, Xenorhabdus sp.
IELTGHDGHSLSSSKTQSRFSGKLWYETDAQGRTTQYIYDDRGRILKCINNANTDYFREETYNYSIEDNGFLTSTKTDIWGNQRRTRFDGLGRVYQQEILEKGQEEQGWRLIQENQYDAFSRIVSETNYDWLPVGQENTKLTKIASQKYFEYDDWGQQCRVTFNTGNNTSKSFLQNYDPVTRTTQSTTQADGLNFSHKIVEYDQNNRPITVKLYDSQHKLYNQQTYHYDGLGRLRATFDVLGKETKYTYDLFDRVSSIKYSDGSVIRKTYAPFSLDKLVTQIEIDEHILGTRSFDSLQRVHSTTSGERTYRYNYQGNCPYQTTDPLGQIVTREYEPLLINALMHVSAGEIQQNFTYDKKTGVLTQVTAENTVTNEMRYTPSGHLYQKISRFDDSEVSRIAEYTYSPIGQLTSYRDITGKICQMQFDKFAL

SEQ ID NO: 4888 - protein, 54 aa, Xenorhabdus sp.
SGDQESQIFCTHLNAELTSIAGQYWLSDEIPDNFAGKAVKLRLVNNELTIETLI

SEQ ID NO: 4889 - protein, 270 aa, Xenorhabdus sp.
MARIIVVTSGKGGVGKTTSSAAIATGLAQKGKKTVVIDFDIGLRNLDLIMGCERRVVFDFVNVIQGDATLNQALIKDKRTENLYILPASQTRDKDALTRDGVEKILNELTQQGFDFIVCDSPAGIESGALMALYFADEAIITTNPEVSSVRDSDRILGILASKSRRAERGEDPIKEHLLLTRYNPGRVNRGDMLSMEDVLEILCIPLIGVIPEDQSVLRSSNQGEPVILDKESDAGKAYEDTVLRLLGEERPFRYIEEEKKGFLKRLFGG

SEQ ID NO: 4890 - protein, 89 aa, Xenorhabdus sp.
MALLDFFLSRKKPTANIAKERLQIIVAERRRGDAEPAYLPEMKRDILAVICKYVQIDPDMLSVQFEQKNDDISVLELNVTLPEIEESPK

SEQ ID NO: 4891 - protein, 62 aa, Xenorhabdus sp.
INKVSEPHQFCAELLASRRQINQLLSARWKLKSSDNLPELLRGWRNNLLAEQIAEILADYPV

SEQ ID NO: 4892 - protein, 108 aa, Xenorhabdus sp.
SDLFVSAITIMELELGILLIERKDATQGTILRAWLEQHVLPEFFERTLPVDTAVAQRCARLHVPDKCSERDALIAATALVHGMTIVTRNVADFQASGVTILNPWEPKP

SEQ ID NO: 4893 - protein, 68 aa, Xenorhabdus sp.
LSGDEQDGGALLFLKRLDEIENLALNGHIERRRRLVGDQELRPGRKRHGDHHALAHAAGKAVRIFIET

SEQ ID NO: 4894 - protein, 232 aa, Xenorhabdus sp.
TQNKEKGTIMTMPQAAPLSAEDAVLSVRNLTTFFHVDGGWKPVVRDISFDVGPGDTVAIVGESGSGKSVTSLSIMRLLDRESSRVQGEILLGGRNLLSLSEDAMRRVRGNEVAMIFQEPMTSLNPLFTIGDQISEALLCHQPMSKADARAETIRLLEKVRIPSAASRFDEYPHRFSGGMRQRVMIAMALASRPKLLIADEPTTALDVTIQGQILDLIKTLQEEEGTSVLFIT

SEQ ID NO: 4895 - protein, 338 aa, Xenorhabdus sp.
REIVFTSGATESDNLGIKGAAKFYQKKGKHIITSKTEHKAVLDTCRQLEREGFEVTYLSPMSNGMIDLKELEATMRDDTILVSIMHVNNEIGIVQDIVTIGDMCRSRGIIFHVDATQSVGKLPIDLSKLKVDLMSFSAHKIYGPMGIGGLYVRRKPRIRIEAQQHGGGHERGMRSGTLPVHQIVGMGEAYRIAKEELQAESERLRGLRLRLWNGIKDIEEVYLNGDLELGAPHILNVSFNYVEGESLMMSLKDLAVSSGSACTSASLEPSYVLRALGMNDELAHSSIRFSLGRFTTEEEIDYAIKLIHNAIGHLRDLSPLWEMFKQGVDLSTIEWSHH

SEQ ID NO: 4896 - protein, 128 aa, Xenorhabdus sp.
MAYSEKVIDHYENPRNVGSFDSEDPSVGSGMVGAPACGDVMRLQIKVSDDGIIEDARFKTYGCGSAIASSSLVTEWMKGKSLDQAEAIKNTEIADELELPPVKIHCSILAEDAIKAAIADYKSKRQAK

SEQ ID NO: 4897 - protein, 279 aa, Xenorhabdus sp.
MTLTWPSPAKLNLFLYITGRRSDGYHELQTLFQFLDYGDEITITPRQDNQIRLLTPVKGVPNDDNLIVRAARLLQDHAEKQSTGTQYRGADIHIHKRLPMGGGLGGGSSNAATVLIALNYHWQTNLSDDELAQLGVTLGADVPVFVKGHAAFAEGIGEKLQPASPEEKWFLVAHPGIEIPTPKIFTDPELKRNSPIRTLPALLQAPFKNDCEPIARKRFREVEQLLSWLLEYTPSRLTGTGACVFGEFESPASARKVLNQAPEWMQGFVARGVNISPLH

SEQ ID NO: 4898 - protein, 218 aa, Xenorhabdus sp.
DCTLLAITPLGYPMKIPSFFRLLPLSAVLLTACTVTQAPDGTGSMSSPQWNDRKTQLQNLTHYQTRGSFAYLANEKKVYARFFWQQYAANNYKLLLLNPLGTTELELSVQPNITQITDSEGKKYISNNPEELIYKLTNMNIPLDNLKSWIIGLPGNAQNFELDKNYLLKSVSDKENGEIWQVNYQGYDTSMTPALPNRLELTQGKNRIKLKMDNWTTQ

SEQ ID NO: 4899 - protein, 25 aa, Xenorhabdus sp.
MQGFVARGVNISPLHTFRCKQTALG

SEQ ID NO: 4900 - protein, 292 aa, Xenorhabdus sp.
NNMIERTDSIYKLLKNIFNLRRDHEIHISLLGGMTNTNYLVIIDGKEMVLRIPGKATENFINRYNEKINSELTSVLGVNSNVIYFDHKTGVKITSFIKNSTALSPKTAKYNDNIKLISHKLRELHSSNLIFNNSFNVFTEFKHYYSLLKNKIIPYSFEYKEEVIDFFYQSEGILNTLGLELCPCHNDLVAENILKLDNNIYIIDWEYSGMNDPMFDIAALFLECNYSSREQEEFLSNYLEKDVHDKVLKKILLFQFTQDILWTIWTIVKEENGESFGNYGLNRLIRAHETMQ

SEQ ID NO: 4901 - protein, 169 aa, Xenorhabdus sp.
YGLCSGVFWGLSCSLLALLLKDNTLASCFIIPIIIAFMNDFISFISLYLYLLCKKDNKKILSSLKNKNNLIIFVAAIFGGPMGMSFYVLSIKYIGVGYTVIISSLYPAIGALISFFILKDRIHKIGLLGLLGLFLAVLCTVILGYSVSSQVISGKSIGFFFAFLCALGW

SEQ ID NO: 4902 - protein, 396 aa, Xenorhabdus sp.
MLDSQTIATIKSTIPLIVSTGPKLTAHFYERMFSHNPELQNIFNMSHQSNGDQRQALFNALCAYAANIDNLSALLPAVEKIAHKHASLNIQPEHYQIVGTHLLATIDEMFHPTEEVLDAWGKAYDVLAGVFINREEEIYQSGELSAGGWRGLRQFRVSRKQPQSDIITSFEFVPVDGGKVSDYKPGQYLSIYLEDPAFEHREIRQYSLTAAPNGTHYQIAIKRESHGKVSSYMHDKVQEGDTVLLSAPRGDFFLDIQPDTPVTLISAGVGLTPMMSMLQYLHKQQHTGIVNWLHAAEHGGFHAFSDKVKAIAESMPNMNYQVWYREPRNEDNFGADYQQTGLMELTSVKNEINVEGMQFYLCGPVAFMQYIAAQLLKMGIHEQHIHYECFGPHKVI

SEQ ID NO: 4903 - protein, 239 aa, Xenorhabdus sp.
MLKRKMNIANYDPELWQAMEQEVRRQEEHIELIASENYTSPRVMQAQGSQLTNKYAEGYPGKRYYGGCEYVDIVEQLAIDRAKELFGADYANVQPHSGSQANMAVYMTLLQPGDTVLGMNLAHGGHLTHGSPVNFSGKLYNVVPYGIDENGKIDYDDIRNQALKHQPKMIIGGFSAYSGVVDWAKMREIADEIGAYLFVDMAHVAGLIAAGVYPNPVPHAHVVTTTTHKTLAGPRGGTG

SEQ ID NO: 4904 - protein, 65 aa, Xenorhabdus sp.
CRIYGGFSAQSQNRDYRTGSYIVDTWVDTIMQTAQTGKIGDGKIFVFDVARVVRIRTGEQDEEAI

SEQ ID NO: 4905 - protein, 154 aa, Xenorhabdus sp.
EESVMSIWVDADACPKVIKEVLYRAAEREKIQVTFVANQRLSVPASAFLRTLQVPAGFDVADNEIVRRSESGDLVITADIPLAAEVMEKGAIALNPRGERYIDATIRERLAMRDFMDTMRASGIQTGGPFTLNQRDRQRLLNELYKRVLPPKKS

SEQ ID NO: 4906 - protein, 302 aa, Xenorhabdus sp.
CSKGCGIPFPPLLEGATVLDLGCGGGRDCFVLSSLVGELGSVIGIDATPEQIAFAQSYIDHHREAFGYAKSNVSFLQGHIEELDKLNLPPESVDVIVSNCVINLSMAKADVLAGMAKLLKQGGEVYFADIFSDRRLEPDLKQDPLIVGECIGDALYFEDFIHLARQAGFLDVRVIAKTLKTISNPIIEAKLGGARLYSITLRLFKMDLEESCEDYGQVAIYKGNLPEAPDRFMLDIGHSFETGRAVPICRNTADMIKKSRYSVLFDVIGEGLRHYGSFQCGTYQQPVFSIESSASDRASCGC

SEQ ID NO: 4907 - protein, 55 aa, Xenorhabdus sp.
IAAENTWLEGKAIQQLETTAQLPDMVRVVGLPDLHPGRGYPVGAAFFSHSRFYPA

SEQ ID NO: 4908 - protein, 242 aa, Xenorhabdus sp.
MALWKTNLALNKWSLDKLEKKLGSIDNPLEEDELPEDMAEYFCYAPGTIGGGNHFAELQQIDEIYQPEILETWQLSKQELLLLVHSGSRGMGQMILEQHVRQYGHKGLEASSVRAQHYLQQHQQALDYAHLNRQLIAERMLGRWRAEGSCLLDVSHNLLTSGVIEGIDGWLHRKGATPSDQGLVVIPGSRGDYSYLVRPVATEQSLFSLAHGAGRKWGRNECKSRLAGRYNAQQLSRTALGS

SEQ ID NO: 4909 - protein, 119 aa, Xenorhabdus sp.
TMCSKEVTEMYVNGLGFKLLGEFQGHNNFDGSIIGHEKHSYHLEFTHHQGTVVGRAPTKDNLLVFYFSENSVWEQCCECMINAGFKVVQSYNDYWDVVGKTFEDIDGYRVVLQNREWTA

SEQ ID NO: 4910 - protein, 38 aa, Xenorhabdus sp.
KMIQQEPDKEQLLIVNLSGRGDKDIFTVHDILKSRGEI

SEQ ID NO: 4911 - protein, 64 aa, Xenorhabdus sp.
LKDSWGNAGQVGLDIQLDKNWMLNTSLWWINIETDVKFKVGDEEHKYKTRLDPWVFMFGIGYKF

SEQ ID NO: 4912 - protein, 268 aa, Xenorhabdus sp.
MERYELLFKKLENQNQGAFVPFVTLGDPNPELSLDIIDALISGGADALEIGIPFSDPVADGPTIQNANLRALSAHVTPTRCFELLAQIRAKYPDIPIGLLMYANLVFHSGIDEFYARCKHAGVDSVLIADVPVSESRPFYSAAIKHDVAPIFICPPNADDNLLREIASFGRGYTYLLSRAGTTGVQNRMKNPLTDLVNKLKEYRAAPAIQGFGISEPAQVTSVINSGAAGAISGSAVVNIIENNLHQPQVMLENLRAFVHSMKSATLR

SEQ ID NO: 4913 - protein, 267 aa, Xenorhabdus sp.
ALKIKQLLGSVQQIPASPEGKWSGRGGFADLTLQFTTCAVRLAKGHLLPPGVAPETQAAQGVLWQAVVFWAALFYHLPLLRQLEGELEDGQVWQPGIGIPDKPFRFRFRAPENISSAPQEVLLAACLLPEKAMMWLVTVPEVWHCLMQHLNGRPSTVPLIETLLQDAAGQLHSPLQVKPVTETVFSTEDNPVPETTVRTPASDITPPPTAPSDDTLTLLSLFQSPDASSPQNQGKNHHHGPKLTKQPGREKESIAPDSHLHSSFKDK

SEQ ID NO: 4914 - protein, 472 aa, Xenorhabdus sp.
FYLTFRNVSLEKKLSLTSLTALVFSSMVGAGVFSLPQNMANAGSPAALMIGWGITGIGILFLAISLLLLSRLRPDLDGGIFTYAREGFGELVGFCSAWGYWFCAIIANVSYLVIVFAALSFFTDTEHSVILGDGNTWQALIGESVLLWFVHWLVLRGVQTAAGVNKLATMAKLLPLGIFIILAVFAFKMDVFTFDFTGIEMGVPVWEQVKNTMLITLWVFIGVEGAVVVSGRAKKRKDIGIATLLAVISALGVYVLVTLLSLGLVTRPELAAIRNPSMANLMVGLIGSAGQFIIVAGLIVSVCGAYLSWTIMAAEVPFIASLHNSFPKIFSKQNDKKAPASSLWITNGAVQVALVLIWLSGSDYNTLLSIASEMVLVPYFLVGAFLAKVAFERSNRVLLFIATGACMYGLWLLYASGLMHLLLSVILYAPGLLVFLYARKQMDDSSRLNKLEKSAIAVLLLTTIPSTWLLMH

SEQ ID NO: 4915 - protein, 38 aa, Xenorhabdus sp.
MLFHISPVKKSRLSDLTEHCEALLLIFGVNPRGDNGTP

SEQ ID NO: 4916 - protein, 303 aa, Xenorhabdus sp.
VMGKVDPRTGLFNYLMPIINLIGNNQLGPEQSITLSYNPLNVADIGFGKGFSLGLTQYDVKNRVLVLSTGERYKVDESDKTVFLRQYKQDVVRFEKDVVQDVYRVIHKSGLVEILTGPLNAFDIKVPKKLVNSFGHYLTFDWLYEMDEAPHLASISDETSKLLNINYKKDICTEITVWPGSSEAYNIELIFYNNKISQIKNRTPNQILSWELDYDPDSEFLCQVSTPTGLTEWVMYNPNGHKFPQGAYLPSLPYVTQYMQYTKDGVVIVRDYEYTDLNFLGYGAEEGSHDDWDSDDDYLSLEH

SEQ ID NO: 4917 - protein, 65 aa, Xenorhabdus sp.
KMKGQVKWFNESKGFGFITPADGSKDVFVHFSAIQGNGFKTLAEGQNVEFTIENGAKGPAAANVT

SEQ ID NO: 4918 - protein, 156 aa, Xenorhabdus sp.
MNIIKQILIQDLERINLAERRDGKVHFNSIFIHQHPYLFLAMIVTYVFLAVLMWYAPYFGTWSLLLFTALFFVMAAVLLFDIKPVYHFDDIDVLDLRVCYNGEWFVDEKVSQNAVNTILGHPNVPNEVKNEIKQIIIKKNGICFYDVFMIACSEQS

SEQ ID NO: 4919 - protein, 169 aa, Xenorhabdus sp.
YNLSALYAFQEAMNDINKIFWLDWGTLLGAIRENNFIVHDNDLDFGMFLSDFSDEIEVALIKKGFKKIKKFEKKDGMEALELTYSFKGVQVDIFFYQSRDNHMICHHFGEFDNPKINNNVKEGLCTTFENYCPLFELTDYNFQGRKFFIPKNTVEYLINYYGNDFMKPV

SEQ ID NO: 4920 - protein, 201 aa, Xenorhabdus sp.
MLWFKNLMIYRLNREISLSADELEKQLSPLVFTPCGSQDMMKTGWVTPMGAHGEALTHAAGNQILICARKEEKMLPSPVIKQELQAKIARLEGEQHRKLKKTEKDSLKDEVIHTLLPRAFSRFSQTYIWIDTVNHLIIVDSASAKRAEDNLALLRKTLGSLPVVPLTFADPIELTLTEWVRSGDLPAGYALMDEAELKALR

SEQ ID NO: 4921 - protein, 242 aa, Xenorhabdus sp.
MRIGIDLGGTKIEVIALGDQGKELFRKRVDTPRNDYPQTLAAIAGLIADAEQATGQRGTIGIGIPGAISPFTGKVKNANSVWLNDQVLDRDISALLGREVRVANDANCLAVSEATDGAAAGKQMVFAVIVGTGCGSGLAFDGRVHAGGNGLAGEWGHNPLPWMNDEDRAYQEEVRCFCGKPGCTEMFVSGTGFMRDYFRASGIHKKGHEIMEAVAQGDKIAELAIQRYERRLARALAQALEH

SEQ ID NO: 4922 - protein, 188 aa, Xenorhabdus sp.
MSGRGIQLAERDGKPSHYLGKPVVKYAKPDRTYVTGEVSHSIHYPDDSVPVFFQDMLMVYTVAEDGSTNELIASGSNRLENKGVRFNTTEAQSHTPEQPNNVDQSPIHANSILQFNLNGIPYGPFHTSSKSADIPMKMENIAPEPKDPTLRQDHKSTIIICLNKADPEPKQVFPEECDYGPMTPGLPN

SEQ ID NO: 4923 - protein, 153 aa, Xenorhabdus sp.
MNKQVEIFTDGSCLGNPGPGGYGVLLRYKQKEKTLNKGYFRTTNNRMELMAAIAALEALKEPCSIILTTDSQYVRQGITQWIHNWKKRGWKKADKSPVINVDLWQRLDKAISPHEIEWHWVKGHTGHRENELCDELARAAANSPTQTDSGYIE

SEQ ID NO: 4924 - protein, 249 aa, Xenorhabdus sp.
MSTAITRQIVLDTETTGMNKLGVHYEGHNIIEVGAVEVINRRLTGRHFHIYIKPDRLVDPEAFEVHGISDEFLQDKPVFADIADEFIEFIRGAELIIHNATFDIGFMDYEFSKLNRGIPPTAEFCTITDSLTMARKLFPGKRNNLDALCDRYHIDNAKRTLHGALLDAEILADVYLAMTGGQTSLAFSMEGEASNNAQVAEIQKITRPQAGLKVIYASDEELLQHESRLDLVEKKGGSCLWRTKSEQLH

SEQ ID NO: 4925 - protein, 117 aa, Xenorhabdus sp.
IMIDDGWLIVSGFNPISLLGLRKPISVVCRKRFYRAQMFSRLRQLDWLRLLNYEVLHHANFHVLPWKSANNAHEPSSSIFGCLNVIIARKRTIPLTLNPMRARLLKPKFSNALGVVK

SEQ ID NO: 4926 - protein, 123 aa, Xenorhabdus sp.
MSKNKMKKAGRNKFINILIVISLLSTTTACTNIRQANDTWTGKDKAQHFLFSAAIAAAGNAYGEHQNWKHRESAQFGLLLSIGLGAAKEFYDSRPTGTGWSWQDFVYDVAGAVTGYSLYQYLK

SEQ ID NO: 4927 - protein, 180 aa, Xenorhabdus sp.
SYFNLPAVLVRSISRLLRQGKQIEIIIGDKTANDFYIPPEEPFKIIGALPYLYEINLRRFTSRLQHFIDSQLLAIRLWKDEDNSYHLKGIWVDNKWQLITGNNLNPRAWGLDLENAILIHDPHKEMQEQRSLELDSIRTHTTVITSYQELDSIQFYPVKVRKLIRRLRRIRVDRLISRIL

SEQ ID NO: 4928 - protein, 397 aa, Xenorhabdus sp.
VAFYVGEDALTVQSPKEDEVIKAPSYTFSGTMQENINSVTVKAFAGHDECSAKLNKHNYTWTCGLYSSVPGDYHVTVVDDAGSHVNRSFKVRYGDNLQMRILAPEEGEQITTPTYTITGKGQAGALITVHISDTLVADTLSCSVYVDEYQSWSCPVMESIPGSYKLKAQQWVDNMASGKPVIRNFDVIYMRDITINPTAAPICTAPDETISIPITGTATKGADISLSVGDNAYKCGPVQVSTTDGSWNCTLENVTPGRYQVKAKQTITVNGHIHENEKVDYVNAAILSISQPVDGGIFSTYSSSIDMLIGGYSQPKMEVSYDILDYGRSYRCHSASETMISGNVGAGSITADDKGYWSFDVNLKHLGWYKLTVSSSGTFCGKPIQTESKFCYRLYMK

SEQ ID NO: 4929 - protein, 776 aa, Xenorhabdus sp.
QNLKDEDLILLLSADIGQFIARQTLLDQAAKLAKRYHISTFDRIQADALLQLPRLTLYQQVKERISGFCRCGITDIDDWTEQFLLTQRLSLEQVIVMLAVPAKQWFVPEKQRYIQHVMQFFTRKITASTQRGNLVRMRLTPSAGRVDMIELNGVKKSALDLLQHLINRPKNTIAIDSQTLLQMPKVNDRLRILQMKSELYHRDTGINGMYLGFPFLLIHTRPSQMKPRIAPLFLWPVNLVMNTGMRGIARLQFDNERGAVKLNPALASLNDIPPVKEWQTILEQLIGYAGLTVDGVMEKLSTIMPVSVKDLSSLPSDAEIAENSASLCCSAVLFHASFIGQAIGEDLQQIAGLPIENTALEKALGLVEAEISEPFPLKAAERYFVSATDPSQETVISVARQNKGLLVEGPPGTGKSQTIVNLIADTIGQQKTALVICQKPAALEVVYKRLIACGLINRIVHVRQAQKGRDVIQSVREQIDSLFMLKKTGDQIINWEYKRGLIAKRINTHETQLDNYYNGLYQHHEAAGCSYRQLLASLITLRDKHNTAAVCFDLPQLLPKLRLFFRSSEPIEIAKIIDYIVQAAPLWLAANYENSPFSQLCYFSSDEHSLQQFNRVLAGFIQTETAREQTLTLPHTQITIDKLADHQAALDACKTAFSLLSALEWKQFSRWLPLFCDEKGPRLRGQQIISQLEVLIEQLQQIDNSLCDPRFFNLLAQSESRLLMQLSLALKEKQLTSFWLHLNPVYYNRQRKLNSFTATHGIENKSDTAYRTLSFH

SEQ ID NO: 4930 - protein, 135 aa, Xenorhabdus sp.
ILNDKVLPFFESHQLPMLRILTDRGTEYCGRVEYHDYQLYLAVNDIDHTKTKARSPQTNGICERFHKSILNEFYQITFRKKLYMSLNELQTDLDEWIDNYNYHRTHQGKICCGRTPIETLLEGKTIWAEKNLTRI

SEQ ID NO: 4931 - protein, 28 aa, Xenorhabdus sp.
MKPIVYLDESGFSQSMPRTQGYSAKGVR

SEQ ID NO: 4932 - protein, 140 aa, Xenorhabdus sp.
LDRIDIKILYELQKNGRITNVELAELVNLSPSPCLMRVKKLQSEGYIEGYSAQININKLGQTLTVFTEITLKNHRQIDFARFLGVVEKIDQVVECHLVSGGYDYLLKFVTSGIVEYQSIMERLTDMDVGIDKYFSFVVLK

SEQ ID NO: 4933 - protein, 364 aa, Xenorhabdus sp.
MRFSPLKVSGSQDNKNRPQIEAMEKPGAYSSVGEDNKLESMDSVLRSLPGTYTQMDTSQGTIAVNIRGMSGFGRVNMMVDGVSQSFYGIAPSEFAHGTQPYNQTGALIDSNFIIRTDVDRGQANDSDSVNALVGSANFRTIGIDDVIFEGNKLGILTKSAYGTNGLGKNGMIAIAGRTQAFSTEGSIGAMLAISGHSIDAHYKNAMGVSSEEFGTDKTFNREPNSQLMKINIKPNDFHELELSGRFYHNKFTKRHIDSYDYYLKYHYTPFSELIDTNILLGSGKGNQYFVKSMSGLGKGESHNKSNTIDIKNTSRFNYGETDISFTLGSKLMDTEYHKKTGIDLSGDLQSTEEIVISLQLENRI

SEQ ID NO: 4934 - protein, 72 aa, Xenorhabdus sp.
MRAPNAQEALYPSEFGAAINPFLKGEIADTYQIGFNRYRSNLIVDGDTFHLKTSFFHTKIKNYISSDQYMLC

SEQ ID NO: 4935 - protein, 444 aa, Xenorhabdus sp.
SKDTKTGAKRAENMLWHKIPKSIYFRRGSLPVALEEVARDGAKRAFIVTDSFLFNNGYADQVIRVLKSHNVETEVFFEVEADPTLSIVRKGAEQMRLFKPDIIIALGGGSPMDAAKIMWVMNEHPETHFEELALRFMDIRKRIYKFPKIGIKAKMVAITTTSGTGSEVTPFAVVTDDITGQKYPLADYALTPDMAIVDANLVMDMPKSLCAFGGLDAVTHALEAYVSVLANEYSDGQALQALKLLKDFLPASYQQGAQNPVARERVHNAATIAGIAFANAFLGVCHSMAHKLGSEFHIPHGLANALLICNVIRYNANDNPTKQTAFSQYDRPQARRRYAEIAEHLGLSKTGDRTATKIEKLLAWLEELKSQLNIPDSIRAAGVQESDFLAKIDKLAEDSFDDQCTGANPRYPLIAELKQLLLDSFYGRKFIESPISQEGAKIEK

SEQ ID NO: 4936 - protein, 207 aa, Xenorhabdus sp.
MRTSTALLSLSIGAFAIGATEFSPMGMLPEIASDLAISIPTAGILVMVYALGVMLGAPVMTLLLIKRSPKAALIFLMSIFTVGNILSALSPDFSLLLIARFVTSLNHGAFFGIGALVATRVVEKGKEASAIASMFMGLTIANLGGVPAITRLSQVLGWREAFFLISVLGFITMISLLLALPRGMQGQPLNLRRELQVLLNFRAHGSS

SEQ ID NO: 4937 - protein, 219 aa, Xenorhabdus sp.
INMKSVAVILSGCGVYDGSEIHESVLTMLSLSRLGAEVSFFSPDESQHHVINHLNGGEKQEIRHIMEESSRITRGNIQPLSEINADTLDALIVPGGFGAAKNLSNFAFKGFECEINKEFFSIVQDMHKKGKPMGFMCIAPVMVPKILGEPIKVTIGNDPETVSQIEKMGGVHVECPVDDIVIDFENKIVTTPAYMLAQSLSEAEIGIDKLVRKILEMIE

SEQ ID NO: 4938 - protein, 93 aa, Xenorhabdus sp.
MNVDDLLSAMTPEIYQRLVQAVELGKWQDGVPLTPEQKEHSLQMVMLWQARHNHDPEHMTIGTDGQIAVKSKQELKAMFQSEMVARLKPQSEE

SEQ ID NO: 4939 - protein, 208 aa, Xenorhabdus sp.
ALLLIDLQNDFCTGGALAVKESEEVISVANEAIQLCQHYNVSIIASQDWHPSNHMSFAVNSGQPVGELGVLNGIPQIWWPVHCVQGQSGADFHPALNQTAIREIFRKGENPQIDSYSAFFDNDRKNATRLHGWLSEQHINRLLILGIATDYCVKFTVLDALEHGYETYVITEGCRGVNIHADDSQQAIEEMAAKGAKFTSLAEIAALF

SEQ ID NO: 4940 - protein, 177 aa, Xenorhabdus sp.
KAHADGFDAFSSPNYPPLIEAGINIRTFNTAPLPVGHGDFVVHQIRSQPIGVVTIYPGLSSQVVENILMQPVKALILRSYGVGNAPQRPDLLRILKEATERGIIVINLTQCISGRVNMEGYANGHALAASGVISGYDMTFEATLTKLHYLLSQNYATEEIRSLMQQNLRGELSYSDK

SEQ ID NO: 4941 - protein, 126 aa, Xenorhabdus sp.
EQLSEMQRYVTQEAGTEPPFSGKLLHNKKSGIYHCLCCSQPLFVSDTKFDSGCGWPSFYQSINDRSINYIDDYSYGMHRIEVRCSHCQAHLGHVFPDGPKPTGERFCINSAALRFIDEDSGEETAG

SEQ ID NO: 4942 - protein, 118 aa, Xenorhabdus sp.
VARIASINIPDQKHTVIALTSIYGIGKTRSQAICAATGIAENVKISELSEEQIDKLRDEVAKYVVEGDLRREVTLSIKRLMDLGCYRGLRHRRGLPVRGQRTKTNARTRKGPRKPIKK

SEQ ID NO: 4943 - protein, 129 aa, Xenorhabdus sp.
MAKAPIRARKRVRKQVSDGVAHIHASFNNTIVTITDRQGNALGWATAGGSGFRGSRKSTPFAAQVAAERCAEAVKEYGIKNLEVMVKGPGPGRESTIRALNAAGFRITNITDVTPIPHNGCRPPKKRRV

SEQ ID NO: 4944 - protein, 206 aa, Xenorhabdus sp.
MARYLGPKLKLSRREGTDLFLKSGVRAIDTKCKLEQAPGQHGARKPGVSDYGVQLREKQKVRRTYGVLERQFRNYYKEATRLKGNTGENLLTLLEGRLDNVVYRMGFGATRAESRQMVSHKAIMVNGRVVNIASYQVSPNDVVSVREKAKKQARIKAALELAEQREKPTWLEVDAAKMEGVFKRNPERTDLSADINEHLIVELYSK

SEQ ID NO: 4945 - protein, 93 aa, Xenorhabdus sp.
MQGSVTEFLKPRLVGYRASQFRRNAKVTLEPLERGFGHTLGNALRRILLSSMPGCAVTEVEIDGVLHEYSTKEGVQGRNPGDSPQSERAGGEK

SEQ ID NO: 4946 - protein, 110 aa, Xenorhabdus sp.
MINNSFHLTQIIASVWGDPSDITDVVWHSGYRKPEREATEIAQLTIDIMEGVPDGVPYSTRPKNLNDILMAELSDIIFGATWSNKATPASVARVILESGYQKGEEQCQIN

SEQ ID NO: 4947 - protein, 167 aa, Xenorhabdus sp.
MGEMMKLTDVAIKKSKPEAKAYTLSDGNGLWLLIEPNGSRGWRFRYRFEGKQKMLSLGTYPEVPLAEARKRTAEFRSKIADGVNPSEDRKQKKRESAIMSENTFEKITLEWYEKRKDRWSAGYRADMMSAFENDVFPYIGNKPIADIKPLEFWTFLREWKKGVLQRN

SEQ ID NO: 4948 - protein, 317 aa, Xenorhabdus sp.
MKLKTTIIATAIFSLTTITTANAAKELTPEKAAEIKPFERITVTGRFNAIYEAADAVSRQADKKGADSFYIQSLDDFNGSGNLRVVADLYHKDAEKVDKTTQYRIYRGIKELPKTEAIILEPFDTVTVSGYFPTDPDLKEALAKAAKKKNAASFFIARDIAPNNGGNQVVTAYVYKEDAPKRQVQSNKAVIPADSEAGRQALEQGGEAAEKVEIPGVASSTSTSNIVGRFFETQSSKGGRYTVTLPNGTKIEELNKASAAQMVPFDSITFSGYYTTAPEVSYQVAKRAAEKGAKYYHVTREWQSNGGNVTISADLFK

SEQ ID NO: 4949 - protein, 237 aa, Xenorhabdus sp.
MHIGVPKERYPNEARVAATPSTVEQLLKLGFNVVVESGAGHLASFDDNAYQKAGAVIAENNEVWQSDIIFKINAPEESEISLMKEGATLLSFIWPAQNPQLMDKLSERNITVLAMDSVPRISRAQSLDALSSMANIAGYRAIVEAAHEFGRFFTGQITAAGKVAPAKVMIIGAGVAGLAAIGAAGSLGAVVRAFDTRPEVKEQVQSMGAEFLELNFKEEAGSGDGYAKVMSEAFSRG

SEQ ID NO: 4950 - protein, 546 aa, Xenorhabdus sp.
ESILAILFSYCGIIGNYRFFQIPFLFTLRAKVVLSANNITMQFGSKPLFENISVKFGNGNRYGLIGANGAGKSTFMKILGGDLAPTSGNVSLDPNERLGKLRQDQFAFEEYTVLDTVIMGHTELWEVKQERDRIYAMAEMSEEDGYRVADLEVAYGEMDGYSAEARAGELLLGVGIPVEQHYGLMSSVAPGWKLRVLLAQALFSDPDVLLLDEPTNNLDIDTIRWLEQVLNDRNSTMIIISHDRHFLNTVCTHMADLDYGELRQFPGNYDEYMVAATQARERLLADNAKKKAQIAELQSFVSRFSANASKSKQATSRARQIDKIQLEEVKASSRQNPYIRFDQEKKLFRNALELEGLTKGYDNGPLFKNLNLLMEVGEKMAVIGENGIGKTTLLKTLIGETEPTSGTVKWSENSTIGYYAQDHASDFDGNLTVFEWMSQWRREGDDEQAVRSVLGRLLFNQDDIRKKVGVLSGGEKGRMLFGKLMMQKPNILVMDEPTNHLDMESIESLNLSLELYEGTLIFVSHDRAFVSSLASRILEIKSDKVI

SEQ ID NO: 4951 - protein, 170 aa, Xenorhabdus sp.
MSVTTQKKRPLSRYIKDYKHSQTHCLHCHKTLDRISLVFNGQVINKEAISEMTELVDDKTWNELQGKFVALCRFCSEIYCNSQTDYFDIMSFKQYLFEQTEMSHSTVREYVVRLRRLDELLTSDNYPEEEFTPEKIQEKLSEKLSESAFSNYNIALRKYEQYLSWQQNGH

SEQ ID NO: 4952 - protein, 120 aa, Xenorhabdus sp.
MPDQTSDKKQKKLTELTNSHDILKRLNPLSRTSNISPTRLNLNVLRELEKYTSEAELKEFLAKWETALAVAATRSREDRQKSSRQQISSQKTGVRSLVSGPSYSDQFLPDVINSSQPGSI

SEQ ID NO: 4953 - protein, 320 aa, Xenorhabdus sp.
MDTWIYLTHGFEVALIPKNLIIALIGCFIGTVVGLLPGLGPINGVAILLPLAFALKLPAESALILLATVYIGCEYGGRISSILLNVPGDAAAIMTALDGHPMAKQGKAGVALSISAVSSFCGSILAIAGIILFAPLLAKWSLAFGPAEYFALMVFAIACLGSMMSHNSVKSLLAALIGLDLATVGVDSNTGVYRFTFDSVHLSDGIQFIVVVIGLFSVSEILLMLESTSTGQKVISKTGKLLFNKKEAKACTGPILRSSVIGFFVGILPGAGATIASAITYMTEKRISGNSDSFGKGDIRGVAAPEAANNASACGSFIPM

SEQ ID NO: 4954 - protein, 143 aa, Xenorhabdus sp.
MSDRIFAVIWLVLCGIGLVIGWGIHSEYSYEPLGPRPFPIAIISLMALCALLLLFRKPEIVNWPAPQTLLRLFLLITSLIFYAGTFEWLGFPLATTLLTVSIALLFNATLPAAIVSGLILGISLFFIFDRLLDVTLPIGSLFR

SEQ ID NO: 4955 - protein, 212 aa, Xenorhabdus sp.
VRWLAGVGTDYGMIAVRQDSPYKTLKELINVLQSNPANLVFGAGASIGGQDWMKTALLAKEAGIDPHKMRYVAFEGGGEALTALLGNHIQVFSGDISEALPYLTSDKIRVLAVYADKRLDGVLADIPTAKEQGYDIIWPVIRGFYMGPKVSDEQYQWWVDTFNKLQQTDEFKKQRELRGLFEFNMTGKELDDYVRKQVTQYHEMAKSFGLAK

SEQ ID NO: 4956 - protein, 29 aa, Xenorhabdus sp.
MSQFFYIHPDNPQMRLIDQSVEVLKRAEL

SEQ ID NO: 4957 - protein, 290 aa, Xenorhabdus sp.
MTEAISEMTKRYDLHSHTTASDGVLSPDQLVDRAISMGIHVLAITDHDTTAGIPAALNHIRQNELPMKLISGVEISTLWQNMEIHIVGLNVDINSVALKSFLSNQVNLRKERGIEIGHRLAKAGIPGAWEGASRLANGGQVTRGHFARYLIEVGIEPTIQRVFKKYLAKGKIGYVPPQWCTIEQAVETIHQAGGQAVIAHPGRYGLSMKWLKRLIIWFKQHGGDAMEVAQCQQAPNERQQLGQLAREYGLKVSLGSDFHQPCSWIELGRNLWLPGDVVPIWHDWSQSGAA

SEQ ID NO: 4958 - protein, 416 aa, Xenorhabdus sp.
FSAFIDACWKESYSFSRFIKDIIAGITVGIIAIPLAMALAIGSGVAPQYGLYTAAIAGIVIAITGGSRYSVSGPTAAFVVILYPVSQQFGLSGLLIATLMSGVILIVMGLARLGRLIEYIPLSVTLGFTSGIAITIATMQIQNFFGLQISEFPENYIDKVITLSQAIPSFHLSDTIIGLTTLLILIFWPKLGLKLPGHLPALAAGTAIMGIMHLLGHDVATIGSSFSYTLEDGTQGQGIPPILPQFVLPWSLPNSPSFDISWSTISALMPAAFSMAMLGAIESLLCAVILDGMTGKKHHSNSELVGQGLGNIVAPFFGGITATAAIARSAANVRAGATSPVATVIHSLLVLLTLLFLAPMLSYLPLAAMSAILLIVAWNMSEAHKVVDLIRHAPRDDIIVMLLCMSLTVLFDMVIA

SEQ ID NO: 4959 - protein, 170 aa, Xenorhabdus sp.
MPKSGGEVMIIDTDLLRAALVCVAKGEQAEKHPGLTGVHITRQHLEATNGHVLVRMELTEHSGTFFDDNDADDLNLVIRFCGDIPEQACFTEIILGDEVRATHLDKDNKVFSFTRLEIIKGRFPDLDKTIPTEKQDVMPLFSAEYLSYPAQMFKGSASVLIEPSGMNAPC

SEQ ID NO: 4960 - protein, 49 aa, Xenorhabdus sp.
MDAIEKSLAALTDDQLTSTNHTLFSVMPEAFNENTIGSLDACPKAEVKS

SEQ ID NO: 4961 - protein, 132 aa, Xenorhabdus sp.
MIANYPPITDEEKMECAEFSVKQKRAIAAKEYLVSCGERFGKLENGNVVFSHENCTVELDSEVIETLLIHQIEKPILEVNPIEKYIALQRFYLGNEINEKENGSTWMRDFIDQVFIDGFKLFTAEPASPSTH

SEQ ID NO: 4962 - protein, 231 aa, Xenorhabdus sp.
MQQKVVNIGDIRVANDLPFVLFGGMNVLESRDLAMKICEHYVTVTQKLGIPYVFKASFDKANRSSIRSYRGPGLEEGMKIFQELKQTFGVKIITDVHEPAQAQPVAEVVDVIQLPAFLARQTDLVEAMAKTGAVINVKKPQFVSPGQMGNIVEKFKEGGNDQVILCDRGSNFGYDNLVVDMLGFGVMQQATNGSPIIFDVTHALQCVIHSVQLLAGVVGRSLNWPLEHIAR

SEQ ID NO: 4963 - protein, 295 aa, Xenorhabdus sp.
MNYQHWLQYAAAQISDNLPDDSSPKREAEILLGHVTGRSRTYLIAFSETSISGEESLQLDGLLARRLKGEPIAYIVGEKEFWSLPLAVSPATLIPRPDTECLVEKALELLPETPAQILDLGTGTGAIALALATERRDCHVTGVDINPEAVILAKNNVEKINIGKVNGQETIHNVNFLQSEWFSAVGDRQFDMIVSNPPYIDENDPHLKEGDVRFEPASALIAAQNGLADLQAIVEQALHFLLPNGWLLLEHGWKQGAVVRNLFLEKGYHQIATFQDYGGNERITVGRWNKNETHN

SEQ ID NO: 4964 - protein, 43 aa, Xenorhabdus sp.
TAHRFNLTLYRLDEVMEGKLDMLIQPIITEYQADQLSALSEQD

SEQ ID NO: 4965 - protein, 78 aa, Xenorhabdus sp.
MAGDPIGEFQKLSEPVLLGFSVFFNRIETLTTADNRTNRDGENVDQQMLFRTIKPGISEVSKGIAEGGCFHDGFYGYH

SEQ ID NO: 4966 - protein, 135 aa, Xenorhabdus sp.
FGHLTDPRLNRTKQHLLIDILTISICAVICGCESFNAIEEYGKSKEDWFRQFLELPNGIPSHDTFNDVINRLNPQEFGEAFIAWVNKLAKISTDIIALDGKTMRGTLDKANGSPAIHLVSAWAVANQLCFGPLEH

SEQ ID NO: 4967 - protein, 82 aa, Xenorhabdus sp.
NLVEIFIDVDDFCRFFIPQWEQFCLNKGYRLRRRKGHMYPSEIMTILILFHLSHYRDFKNFYLEHIWRYHHHDFPTLLSYTR

SEQ ID NO: 4968 - protein, 238 aa, Xenorhabdus sp.
VDANQEQVKLYDSILDTIELIKFTDSQKLPEGWSYTSIENDYSHTFPFANDTFKMENFFDLSYRKVPHYKSDEKPPYYQRKLFWVTTNNIDSIRISAKITLDGKTYKTFDQLTLKDHREGSKFTTLVGYPPIIYHAQDLIHIIKKDFNFGEYVVKTDAREKHYKWVQNNYYILPKIKFGNFTIKDITVSETYNDYYTTANNYRCFTHHTKANDLYLWFIWGQERTVKDAGDNHSTKKL

SEQ ID NO: 4969 - protein, 317 aa, Xenorhabdus sp.
MKFLVTGSAGFIGFHVSQRLLNMGYEVVGIDNINDYYDVNLKQARLNLLLPHPGFKFEKLDLADRAGIAELFTKHQFQRVIHLGAQPGVRYSIQNPMAYIDANIVGHMNILEGCRHNNVEHLLYASSSSVYGLNKKQPFSTDDSVDHPVSLYAATKKADELMSHSYSHLYKLPTTGLRFFTVYGPWGRPDMALFKFTKAMLEGRTIDVYNHGDMVRDFTYIDDIVESIIRLQAIIPEPNKDWSVETGQVSASSAPYRIYNIGNGQPTKLGDFIEAIEASLGIKAAKNFMEIQDGDVLSTCADSSALTRKLVFLRIHQ

SEQ ID NO: 4970 - protein, 223 aa, Xenorhabdus sp.
NEIANLAEMLGADIEHVRQGIGSDSRIGYHFIYPGCGYGGSCFPKDVQALIRTSEQIGYTPKILQAVELVNEKQKRKLPSFVKHHFGTDLSGKTFAIWGLSFKPNTDDMREASSRVLMEALWESGAKIQAYDPEAMQETQRIYGQRDDLALMGTKEAALKGADALIICTEWQNFRAPDFDLIKDSLNTPVIFDGRNLYDPERLQARGFTYYGIGRGDSINPVI

SEQ ID NO: 4971 - protein, 332 aa, Xenorhabdus sp.
MHNEDEKNAEKQSLIVLSGEQKNQGMGMSISVSGNQVYDNPAIAYLVSLGSKRSRQTMKSFLNIVAKMLGYQNVRDCSWSDLRRHHIQAVMEMLSDSGKAPATINTYLSALKGVALEAWTMKQLDTDSFQHIKQVRSVRGNRLPKGRALERHEIKNLFYACEDDISTKGLRDAAIIGVLVGCGLRRSEIVSLDMKSIIYREQALRVMGKGNKERLSYMPEGTWRRLNRWIDEVRGDHAGPLFTRIRRHDDVTDSRLSDQAIYHILENRRIESGVEKFAPHDLRRTFASAMLDNGEDIVTVKDAMGHSSITTTQKYDRRGDKRLKNAARNLNF

SEQ ID NO: 4972 - protein, 296 aa, Xenorhabdus sp.
MQSVAEERSYSLPGNDGKEITYYLIQKNSINSEDLLVLIQGSDCGSVINNKKMIKNFGAAFPTNDILLVEKTGLDSSFGKNGVEVSDSECPPAYIQNDSPLKRVKDYIAVLNKLKSKYRHIILLGGSEGAIVTNLIVSERNADFITAAIAMNGGGRFFIDDVIRSIRHQTPAEMFDKEVDSFKTFAKEAKKQNMPVGMNVSGHGANWWYESLSIDNQNSIQSSKVPLLVIQTMGDNNVDAAGARKMMADINNPKVSFKAYDGLDHYFIDKDGNYHAAMIINDIQNWYQLQNNRHSS

SEQ ID NO: 4973 - protein, 278 aa, Xenorhabdus sp.
LSLPDSRTLYWYEWGPITGKPLIFCTGAGMSGSLGFGKQELERLNIRLIVPDRPGLGNSSLHSHKTLVSFAQDVAEILKHCWLQKCMVLGFSQGAVFALTLAKICKATGLAIVAGQDQFNYPATQQLLNQDVVNMVKQRNAEPEMLKQWVSQNITADWLMNFIMAHSSAVDLSLYSQPNFLQAYRQCLNEGFSQGAERYTQDLLLTFGQWPFDPEDITCPVHLWYGKQDASTGHSPDFGEILSTRFPHAEHTVFDNEGGSLLWRKSKDILEKLVLTYI

SEQ ID NO: 4974 - protein, 174 aa, Xenorhabdus sp.
GTIWFTDPPYGIINDNEGYKSESQIIGCYVYCYDPADNSISIATSDTQRPNGLAFSPDEKYLYIADMSIVDFPKHGRHELRIYPVRDKVLGIGKHFATISPGFPDGFCIDKLGNIYCSCENGVIIFDKFGTKIDKIEVPERVSNCTLGGIKGDQLYITATTSLYRISVTQFIKG

SEQ ID NO: 4975 - protein, 533 aa, Xenorhabdus sp.
PVVDLPVTVVDLSGQNEIPDDHQQSPLQRALAYCQNNLETPFTLSQPGLARFLLIKLGEQRHILHFCLHHLICDNDSVALILNNIATAYAGEALFSDDAGADILEYADFAIWQDELLRGDYLDGDEAYWLNELSGVDGRLEFAIGNPVTSKSEQGGMVRRLLESHLANTFNHCASGLGISPALAYFTVYAALLYRLTGQQTIVFGVPTSLRDDARLEKTIGYFINVLPIKVTFHPKISFADIATQLSDQLYTGIQHQQFPYSSIVRSVSHAQQTPQTPLFNVMYNYFVGQTDWMLPGTRAYLHELTPVGGKFPLTLFVVNHIDTVELCFEYQYNHVAADYSDVLINSYQQLCTAMILNADQEVLAQSLLSEDDYQRQVLAFNQTDTLFQEDFCQHFLRQLSTEPELTAVEYLTGSHDESISYEKLYFLSQKVADELRRHIPSETAQQARVVIFSGATPLALATIIACLMEGIVWIPVDSHLPLNRFLMIIEDACPDAVVIEESGVDDKNASLVAEISRFNTPVIELTREWEAA

SEQ ID NO: 4976 - protein, 322 aa, Xenorhabdus sp.
MPLDIITAYRKSNALFAFVDSKAPLYLSTEKGKTVEQLARLCNVYQDRFHSLLNYMKKLNILTKQEDKFYLTEQWASLNDQNSFETLYIKFELDPVFWNTWSQYSSSLKKPNKKSAFELTHHESFFDYLNHENNKDIKLTFDNLMGEMTNKTNNHIIDHIPLDDIKTFIDIGGGVGSFVKNIKTHHPHIQCHVMDQYNFTRKESEEITFINGDFFSEIPSGYDAYSIKNVLDDWPDDQAIDILKNCHTAMRDDSVLYLIDIIKEPHEATSFDLYIDTLLLGRRRYQSDFEFMVKQAGLSIKNIYNLNYSTENGNYYLFEIKK

SEQ ID NO: 4977 - protein, 78 aa, Xenorhabdus sp.
FEQVNVFSDKKLQGNPLAVVVGADNLTEQQMAQFAKWTNLSETTFLLKPLHPDADYRVRIFTPAGELPFAGHPTLGSC

SEQ ID NO: 4978 - protein, 380 aa, Xenorhabdus sp.
MNQASLSVNKSPGYILGWIEKVGNKIPNPFVLFIYLIAVLMIATAILSWFDLAVKNPIDGEMVRVKNLLSAEGIQWILPNIVKNFSSFTPLGAILALVIGAGLADKVGLLRALMYKMATGINKRYASYMVLFIAFFSHISSDAALVVMPPLGALMFIAVGRHPVAGLLAAIAGVGSGFTANLLIVTTDVLLSGISTEAAKMFDPNLHVSVIDNWYFMAISVIVLTIAGAILTDKFIEPRLPAWEGNNEEKLEKLTPQQNRGLLMTGLSALIFIGIVGLMVVPENALLRDPLTGSVLPSPFIKGIVPLIILFFFVVSITYGVFTKQIKTPNDIPELLVDPMKSMAGFIVMVFPLAQFVAFFNWSHMGKFMAIGITGLLETL

SEQ ID NO: 4979 - protein, 355 aa, Xenorhabdus sp.
EWLSHFSGGFTGIVATLDTGKAGPTLAFRVDMDALDLNEDQTHVHRPHAEDFSSCNAHMMHACGHDGHTAIGLGLARILKQYENWLTGKIKLIFQPAEEGTRGAKSMVEAGVVDDVDFFIAIHIGLGIPMGELVCGNDSFLATTKIDVTYRGAASHAGGKPEEGKNALLAAAQATVGLHAISPHSKGISRINVGVLQAGTGRNVIPDYALMKVETRGETNEINEFIYGHALGVIEGAAKMQNVEYEIELMGAAQSSKPSPAWVDFIYQQAQQHVPELSSVVKSGRQSVGSEDATYFMERVKANGGLASYLIFGTELSAGHHHGQFDFNEDVLAIAVKTLATITIHLPDFDAQRHQ

SEQ ID NO: 4980 - protein, 170 aa, Xenorhabdus sp.
QILDAVQAVICRDGIYECNHRAVASEAGVPLGTTTYYFKTLDDMLSAALGKYFNNFIELSHNWFQQSLFEDPAENLTEFISWTFADYSRLKSEYELYVAAISRPSLRPLAVNWMQATKDIISQYITNDESKAKALTAVLDAFFLQSLLTGDINFSKKEYIRPFISKILSD

SEQ ID NO: 4981 - protein, 172 aa, Xenorhabdus sp.
TSPIAGGTRIENHQSRGSFLGDVIVKSNINKSMSLQDIIKQVSQSIYRAIENSNIHMSVVIEAVGEKARENIFNVLFNYMDAQSMYDFIDISKDEKLSLPNLDVELIETDVIPFESLGMNLLYMPESIGCELNYNPELYTEEVIESLAKHYERLLNVIVSGQEKESISQFYG

SEQ ID NO: 4982 - protein, 370 aa, Xenorhabdus sp.
MAIDMYLPAFNAIKESLNTDLVKVETSLSLFLVGLAIGQGMLGPVIDHYGRRTPLLLGILIFSLASLLTSTTDDIVLFNIGRIVQGLSGAVTLLVPLSLICDTCDAHTWARIFTILMQIVVIGTIITPPLGSILLSVFGWRAIFLMLFALSFFTLIAAYRFIPESLPKENREKGSLSKQLYSYIKVTKNSYFLMNVLSSSFVMGTLFAYINSSAFIFLNHFGFTPKVYSYFFAANAVGMVFFGFINMKLLKFYKAAVVLKWSLLANLFFVMLLLISVTTGLTSIYFVIPLLFMSVATLSLLFGNGISVTMNSVSRAETGTASAVLGMIQYLFGGFAGLLVGLLNNGTLSGIALTMFICSTGALVTYQMAK

SEQ ID NO: 4983 - protein, 115 aa, Xenorhabdus sp.
MRVLGIETSCDETGIAIYDDKSGLLANQLYSQVKLHADYGGVVPELASRDHIRKTVPLIQAALKEAGLTSKDIDAVAYTAGPGLMGALMGGATIGRSLAFAWDVPAIPGHHMEGH

SEQ ID NO: 4984 - protein, 50 aa, Xenorhabdus sp.
IDDPRSDINKKHELMDVIFLAFSAVLCGASGWKSIQEFGELQIEWLKQYT

SEQ ID NO: 4985 - protein, 242 aa, Xenorhabdus sp.
VVIIKFYGDPSEGGQLVTGYKENKYDKYFLYANGPETSWNWIYWDKAGESSKELLIRMRVEYAGQSIVGDLYKLIWDNNGTDMFLCRADDEWGYVSSKDYTLFTFESCFIDQNDIFEKLKNTWPTAEIYFHMKKQNYEAISNITINEIYNESGLDKYKIRDYSFTSEDFCYVYKSEASKHAYNKELTHGYAVGIMYFTQNDNTIGAVNVFIDSSLDVYIFNPEFRSIIKVKDWDYPPSKIIM

SEQ ID NO: 4986 - protein, 236 aa, Xenorhabdus sp.
VLTGWFTLSHWLPLVASHWLPQGMKLSLTQPKWTNNRLQLDSLTVQVQKCELIKLSGLSAGYLPKQRAEGKYWDIHIANVYSQSECLPQLPITQKQPAPVSVDEILSSIPAIKLIIDHVALSPWQEFAGTLQFDSSSHQQTLSYQGSQLKLSADITDKKYLNVHQFFAKLAHQTISLNGGFSLPLDINKLPEQGRITGQLSVRQFPEPLVMLLEWQGQNGKFTITQEPSQLDKNDL

SEQ ID NO: 4987 - protein, 144 aa, Xenorhabdus sp.
MNRAIPLAVATLLLTACQSTGVSATGNVTAKDLQHHKFALVSVNGENVSNKEDTKLSITFGKNMFVSGTMCNNFMGVGELKDNVLIVNKLTKSDIFCVNEKLNKWDRVIIDILTYGATVSLQNRQLTLKNNRNKLVYTLRKPAQ

SEQ ID NO: 4988 - protein, 331 aa, Xenorhabdus sp.
MKVAVYSTKQYDRKHFELLNQKLGLDYHIEFFDFPLSPQTAKNAVGADAVCIFVNDDGGREVLQELAEMNIKILALRCAGFNNVDLDAAKELGIQVVRVPAYSPESVAEHTVGLMLCLNRRIHRAYQRTRDANFSLEGLTGFNMYNRTAGIIGTGKIGLATLKILKGFGMHLLAHDPYPNKEALELGVRYVDLDTLYAESDVISLHCPMTPENHHLLDEIAFSKMKDGVMIINTSRGALIDSVAAINALKQQKIGALGMDVYENERDLFFEDKSNDVIQDDIFRRLSSCHNVLFTGHQAFLTEEALTSISETTLQSIQQLTSGEPCPNLVG

SEQ ID NO: 4989 - protein, 351 aa, Xenorhabdus sp.
MRKIIHIDMDCFFAAIEMRDNPSLRDIPIAVGGSADRRGVISTANYPARRYGVHSAMSTSMAMKLCPQLKVLSGRMAYYKEVSQHIRQIFARYTDLIEPLSLDEAYLDVTDCQYCQGSATLIVKEIRQVIFDELQLTASAGIAPVKFLAKIASDINKPNGQYLISPTQVDDFVQSLPLRKIPGVGKVTAGRLSDMGLVLCSDVQDYDKLALIKKMGKFGLVLWQRCHGIDERQIKPDRLRKSVGVEKTLAKDIHDWRDCVELIEQLYPELEKRLGKVKPDLRIARQGIKLKFDDFQLTTQEHTHPLLDKQDLLKVAQQAWETRREGRGVRLVGLHVTLQSPQLERQLLLEL

SEQ ID NO: 4990 - protein, 152 aa, Xenorhabdus sp.
VKEDAPRILDYYEKRWLIEEFHKAWKSGGTRVEALRMQCKENLEKMVVILAFIAVRVHQLRYVGLNKSEAEKQSCETLLSPLAWKLLWTKQEKKKLPKTAPSIYWAYINLGKLAGWYDSKRNGRVGWERLWEGWFMLQTILDGYLLSKSLDL

SEQ ID NO: 4991 - protein, 116 aa, Xenorhabdus sp.
MNSVETIKHAKSAESLLTVKDLNVVFSTPDGNVTAVNKLNFDLQAGETLGIVGESGSGKSQTAFALMGLLASNGTVSGSAVFNGREILNLQEKALNKMRAEEISMFFQDPMTFLTL

SEQ ID NO: 4992 - protein, 302 aa, Xenorhabdus sp.
MLLNKKNSEALENFSEQLEIEGRSLWQDARRRFIHNKAAITSLCILFVITLFVILAPMLSQYTYDDTDWNMMTMPPDFESHHYFGTDSSGRDLLVRVAIGGRISLMVGIAAALIAVIFGTLYGAMSGYLGGKVDMVMMRLLEILNSFPFMFFVILLVTFFGQNILLIFVAIGMVSWLDMARIVRGQTLSLKRKEFIEAALVCGVSSRNIVLRHIVPNVLGVVVVYASLLVPSMILFESFLSFLGLGTQEPLSSWGALLSDGANSMEVAPWLLLFPAGFLVLTLFCFNFIGDGLRDALDPKDR

SEQ ID NO: 4993 - protein, 218 aa, Xenorhabdus sp.
LVPKSLPVSAKLGAAAFIMTVIFGVSAGVIAALNQNTKWDYTVMGFAMTGVVIPSFVVAPLLVLIFAITLKWLPGGGWNGGAPKYMLLPMVALSLSYIASISRITRGSMIEVLHSNFIRTARAKGLPLRKIIFRHALKPALLPVISYMGPAFVGIITGSMVIETIFGLPGLGQLFVNGALNRDYSLVLSLTILVGGLTIMFNAIVDVLYAVIDPKIRY

SEQ ID NO: 4994 - protein, 28 aa, Xenorhabdus sp.
VKPVSFTLQPRKTLALLVQTAPANPHWP

SEQ ID NO: 4995 - protein, 317 aa, Xenorhabdus sp.
MTSEGPVKAVDRLSISLTEGEILGLAGESGSGKSLIAKAICGVAKDNITVTADRFRFNDIDLLRLTPRQRRKVIGHNISMIFQEPQLCLDPSESIGKQLIQSIPGWTFKGHWWQRFNWRKRRAIELLHRVGIKDHHDIMNSYPYELTDGECQKVMIAIALANQPRLLIADEPTNAMEPTTQAQIFRLLSSLNQNNNMTILLISHDLQMMSKLVKRINVLYCGQTVESSTPDDLLVTPHHPYTQALIRSIPDFGSPLPHKSRLNTLPGVIPSLEHLPIGCRLGPRCPYAQKTCIEAPRLRGSKSHTFACHFPLNMEEQ

SEQ ID NO: 4996 - protein, 213 aa, Xenorhabdus sp.
GRNLSSRYRMGTSSTFGAALVVTSAAAIVGLVIGSLAGITHGLKSAILNHILDTLLSIPSLLLAIIVVAFMGASLQHAMIAIGLALLPRIVRAAYTAVHDELDKEYIISARLDGASNYHILRYAVFPNITAVIVNELTRTFSIAILDIAALGFLNLGAQLPSPEWGAMLGGSLELIYTAPWTVMLPGAAIMLSVLLVNLLGDGLHRAINAGVE

SEQ ID NO: 4997 - protein, 541 aa, Xenorhabdus sp.
RKKIAAGVAVALGMMIGAQAFAAKVPAGVQLAEKQTLVRNNGSEPQSLDPHKIEGVPESNIARDLFETLVINDPDGNIIPGVAESWEHSPDFKTWTFHFRKDAKWSNGDPVTAQDFVYSWQRAVDPNTASPYASYMQYAHILNVDEIIRSKKKPETLGVKALDDYTFQLTLSEPVPYLVRLMVHTSTSPVHRATVEKYGERWTQPQNFVGNGAYKVKSWVINERLVFERNPMYWDNKNTVIDQTIVLPISSEVTDVNRYRAGEIEMTYTNLPVELFQKLKKEIPEQLRFSPKLCTYYYEINNERPPFNDVRVRTALKLGMDSELMTHKVKNQGDVTAYGYTPPYIADFNDEKPDWYTKLTQQQRNEEAKKLLAEAGFTKDNPLKVKLLYNTSDLHKKLAIAAASIWKKNIGVEVSLENQEWKTFLDSRHQANYDVARAGWCADYNEASTFLNPMLSDSSNNTAHYKSKEFDALMTQSLQAKTDEERAEIYTKANAQLDKDSAVVPLFYYTNSFLLKPYVGGYTGKDPLDNFHTKNLYIIKH

SEQ ID NO: 4998 - protein, 419 aa, Xenorhabdus sp.
MTLLALGINHKTAPVSLRERVAFSPDTIGLALDNLLQQPLVRGGVVLSTCNRTELYLSVEQQDNLKEQLINWLCEYHQLSHDELNTSLYWHLGSDAVSHLMRVASGLDSLVLGEPQILGQVKKAFSESQSYQSLSGELERLFQKSFSVAKRVRTETEIGANAVSVAFAACTLARQIFESLSQLNILLVGAGETIELVARHLKEHRVNHLMIANRTKERAYTLANEVNAEVISLSEIDTRLAEADIVISSTASPLPIIGKGMVERALKLRRNQPMLLIDIAVPRDIEPDVEKLSDAYLYSVDDLQAIIQQNLAQRKAAAVIAEGIVQQESTHFMDWLRSQGAVNTIREYREQAEKIRAEMTAKALMSIQQGADAEQVINQLTHQLTNRLIHTPTKSLQKAASDGDLERLNLLRDGLGLDP

SEQ ID NO: 4999 - protein, 295 aa, Xenorhabdus sp.
MKPSIVAKLEALQERHEEVLAHLGDAEVIADQERFRALSKEYAQLTDVTSCFKSWKTTQDDLQTAEMMLDDPEMREMAQEELKDAKIRNEELEQQLQLLLLPKDPDDERNCFLEVRAGTGGDEAAIFAGDLFRMYSRYAESRRWKVEIMSANEGEHGGYKEVIAKVSGEQVYGHLKFESGGHRVQRVPETESQGRIHTSACTVAVLPEIPEAELPEISSADLKIDTFRSSGAGGQHVNTTDSAIRITHIPTGIVVECQDERSQHKNKAKALSVLGARIRAAEMQKRQEAEASEHT

SEQ ID NO: 5000 - protein, 298 aa, Xenorhabdus sp.
MNKSEKVIWTEGMFLRPHHFQQAESYLEAYVRDWGKAQLPYYWGFLTLELNQEFLNQGKIMLSSASGIFPDGTPFSFDGANAPEPLQLSENQTDINVMLALPHFRRGREEVIFSEQKNSLARFISFETEVNDFNAMSVGSAILQFGKMRLRLMAESDLTPEWTALKIVHVVNRTSDNKIYLDQQFIPPLLNCYASPQVAGFVTDIQGLLEQRRQQISQRLLQLGRHNDSEIMDFLLLSLVNRYSGQVNHANNLSLLHPERLFSEWLQFATELATFSQSRVPDENLPLYDHDNPLGHME

SEQ ID NO: 5001 - protein, 104 aa, Xenorhabdus sp.
AISSPKNNNGLELIYIDDKVNKDGSITIETFHRQHSHLPARFQNQRIKALVNGEKVYYQDGEPCDIPEGCRLDVRVQMLENAVWNVKQKEAKVTTDSEQAEQVE

SEQ ID NO: 5002 - protein, 88 aa, Xenorhabdus sp.
VTFITKKRSNIKASVLEDWDKIMLSRRFIIETVNGQLKNICQIEHSRHRSIKGFLLTVLTGLIAYCHKKKKPSLKVFYSEEEDIPVTA

SEQ ID NO: 5003 - protein, 175 aa, Xenorhabdus sp.
LVPCALKEPADIGDGETLLVNTDGTYEYSKVSSFEGARGKRVYISVATPPVFTLDNYRTVLTSEGIGQSFVNSLTVAVPATVIPILIAAFAAYALSWMSFSGRNLLIAMVVGLIVVPLQMSLIPLLRLYNEIGTIFGVPSKTYAGIWLAHTAFGLPLAIYLLRNYISGLPKEIIE

SEQ ID NO: 5004 - protein, 151 aa, Xenorhabdus sp.
KMPNGGAVANITLATSESWRDKQTGEMREKTEWHRVVMFGKLAEVAGEYLRKGSQVYIEGALQTRKWQDQSGQDRYTTEVVVNPIGGTMQMLGGRGGASQDAPAQGGWGQPQQPQATQQFSGGGAPSSRPAQSPAPQSNEPPMDFDDDIPF

SEQ ID NO: 5005 - protein, 339 aa, Xenorhabdus sp.
MTSLITKHIVSETGERLKLLVDGSSGVPLFYPNLYSTSQIRGAAKSVATIQSYITSMKVLYSWAAEYSVDIEDRWKRAEWLKVWEIDSLRDYCSLPLRSPSEQNEKIVNIKQSRLTTATNVNSPTKYVRMTFIADYLKWLAEIITTNPSKNMKIEIDAMYKNIKSHRPKKKGRSEISREDKGLDSHLLKEVMEVSKPEHDNNPYQGYSLQVRNAAIIALLHYLGIRRGELLNLRIDDIDFVANEIRIVRRADSFVDHRVYQPLVKTEERILPISDRLAEILSGYVMKYRSAFSRARNHMSEYEVLDKIKAIPNVVAMMGPLDKVRSHMPVTLKDLDAIG

SEQ ID NO: 5006 - protein, 68 aa, Xenorhabdus sp.
VEQVLEAISKINDKLVEKYGENYYVEDPRESAKKPSLECNTRLDTYKYILELEPHLSAEVIRYINAPE

SEQ ID NO: 5007 - protein, 128 aa, Xenorhabdus sp.
GWLATGDIANLDEKGFLHIVDRKKDMILVSGFNVYPNEVEDVVSSHPKVLESAAIGVPNENSGETVKIFVVRKDPSLTEDELKTHCRRYLTAYKVPKIIEFRDELPKSNVGKILRKELRKEEIEKAEK

SEQ ID NO: 5008 - protein, 295 aa, Xenorhabdus sp.
NYQLITSNAQLQFICDRAKQHAKIALDTEFVRTRTYYPQLGLIQLFDGEELSLIDPLEISQWQPLRELLTDPNVVKFIHAGSEDLEVFWNSFQCMPTPIIDTQVLAAFIGHPLSCGFATLVSEYLHVELDKSESRTDWLARPLSEKQCEYAAADVYYLLPLADILMTATEQAGYIDAAKDESELIVQRRKEILMPESAYKDISNANQLRPRQLACLKKLAAWRLNQARERDLAVNFVIREENLWQVARYMPTSLGELDALGLSGQEIRCHGRRLLAMVAECRDLSDDECPELIKN

SEQ ID NO: 5009 - protein, 40 aa, Xenorhabdus sp.
VPENTAQVLPEDIFTVQVTGLMQHPHRPQSLQEEILTVCE

SEQ ID NO: 5010 - protein, 100 aa, Xenorhabdus sp.
VSDSLTYIIPTTAKTYSVYLPETTLTATLSADAFGLAVTAIVFARIAELDEPDADAFRFCELREYALHHPETGLLRAVLAMQPKEDIISSSFIHNNPHHH

SEQ ID NO: 5011 - protein, 148 aa, Xenorhabdus sp.
MQQNTTPATVHTVSPAERSPFADIFPHTGSLELMLLEHTFIKAAAGLCDDDRCDRWQYRKVSDRIAYIVPMRPDSSGVKVNTTDFKGEVSADAFGLMVTLSVLGYLTDLMKLDGYAERLCTLREYARQHPQAQCIRAALGLKGARDAR

SEQ ID NO: 5012 - protein, 135 aa, Xenorhabdus sp.
NKVIRHIATGTAAVHDSQFFEAVLDRSNTRRDIYADKGYASQKRERVLKEQGYRVHIQRKAARNKPLSHCQKGRNKKIAKTRARVEHIFGSLSQMGEKIIRTIGQLRANFAMTMKATCYDLQRLVYFGKSGIHAF

SEQ ID NO: 5013 - protein, 322 aa, Xenorhabdus sp.
KGRYVSGVGAWVMFFSVCVNSVGALTAYMSGSGKLLQSLLGISPTLGSLLFFVPAAGVLYLGLKAIGRGEKFISIGMLVMLLTLVVATLLKDTTQMRYLLDGDWLFMVPLFNVVVFSFSAQYIVPEMARGFADKPEQLPKAIIIGMAVIFVLLAMVPMSVIALNGLDNISEVVTISWGQALGEWAFFSTNLFALCAILTSYWGLGGSFLTNIFDKFRLGNDEQPLRRFGVLLLVAVPPFVLAYSGLVSFVNALYFAGVFSGVILSIMPILILRGARKYGDHTPCWQCSWITHPLLQISIVLLYLASAVYAIASLFGYLPAGW

SEQ ID NO: 5014 - protein, 525 aa, Xenorhabdus sp.
MTTNIHQHRILILDFGSQYTQLIARRIREIGVYCELWTWNVTEEQIRAFNPSGIILSGGPESTTENNSPRAPEYVFNAGVPVLGVCYGMQTMSMQLGGEVSTSNEREFGYAQVELKGDSELFRGIQDALNESGTPVLDVWMSHGDKVTAIPEGFTTVASTDSCPFAIMANEDKRWYGVQFHPEVTHTHQGLNILKRFVLDICQCEALWTPASIIDDIVERLRAQIGDDKVILALSGGVDSSVTALLLNRAIGKRLTCVFVDNGLLRLNEADQVMEMFEGKFDLNIIHVKAEDRFLSALAGINDPEAKRKTIGHVFIDVFDEEASKQTQVKWLAQGTIYPDVIESAASATGNAHVIKSHHNVGGLPEDMALGLVEPLKELFKDEVRRIGLELGLPYDMLYRHPFPGPGLGVRVLGEVKKEYCDLLRRADAIFIEELHKADLYNKVSQAFTVFLPVRSVGVMGDGRKYDWVVSLRAVETIDFMTAHWAHLPYDFLGRVSNRIINEVSGISRVVYDISGKPPATIEWE

SEQ ID NO: 5015 - protein, 323 aa, Xenorhabdus sp.
ALKDVVLQKMHEKRVEKALVVDDNFHLLGMITVKDFQKAERKPNACKDEQGRLRVGAAVGAGAGNEERVDALVAAGVDVLLIDSSHGHSEGVLQRIRETRAKYPNLQIIGGNVATGEGAKALVEAGVNAVKVGIGPGSICTTRIVTGVGVPQITAIADAVEALEGTGIPVIADGGIRFSGDIAKAIAAGAACVMVGSMLAGTEESPGEIELYQGRSFKSYRGMGSLGAMSKGSSDRYFQTDNAADKLVPEGIEGRVAYKGLLKNIVHQQMGGLRSCMGLTGCATIDELRTKAEFVRISGAGIQESHVHDVTITKESPNYRLGL

SEQ ID NO: 5016 - protein, 52 aa, Xenorhabdus sp.
VDEITTFPVGAHDDVVDAMTQALRDLYQKKRGFSMNPDIVNQALRPSRTMRR

SEQ ID NO: 5017 - protein, 28 aa, Xenorhabdus sp.
VALAMDSALSASGAYTLIQHAWEHGFRA

SEQ ID NO: 5018 - protein, 97 aa, Xenorhabdus sp.
MKIRPLHDRVIVKRQEVESKSAGGIVLTGSAAGKSTRGEVLAVGHGRILESGDVKALDVKVGDIVIFNEGYGVKAEKIDNEEVLIMSESDILAIVEA

SEQ ID NO: 5019 - protein, 294 aa, Xenorhabdus sp.
MAAKDVKFGNDARSKMLRGVNVLADAVKVTLGPKGRNVVLDKSFGAPVITKDGVSVAREIELEDKFENMGAQMVKEVASKANDAAGDGTTTATVLAQAIVTEGLKAVAAGMNPMDLKRGIDKAVVSAVEELKKLSVPCSDSTAIAQVGTISANSDETVGKLIAEAMDKVGKEGVITVEEGTGLEDELDVVEGMQFDRGYLSPYFINKPESGSVELENPYILLVDKKVSNIRELLPVLEGVAKASKPLLIIAEDVEGEALATLVVNNMRGIVKVAAVKHQVSVIAVKQCCRILLS

SEQ ID NO: 5020 - protein, 52 aa, Xenorhabdus sp.
MLQDIAILTNGTVISEEIGLELEKATLEDLGQAKRVVINKDTTTIIDGVSEA

SEQ ID NO: 5021 - protein, 124 aa, Xenorhabdus sp.
SKEPWSINAFAAKVGEILFDEHDYIAATHQWLKSQQYYLWNQLSAFSELTVWPPSANFLFFRCEQPVIDLWHALLKHQLLIRHCKNYAGLDNRYYRIAVRSEWENQRLITAMHQVFSSRSALIR

SEQ ID NO: 5022 - protein, 183 aa, Xenorhabdus sp.
MPAEYEVIINGHELEMPLRSSNAAVIDGNIFNCQFPLGKPFPEEINLYDKKSQGKITSKCFDKPELLQYFSTEYDEKFTPETKADENNDTVNTVFDYTVPTPQFKHADVQKEAEKLVSLLNQIKSSDNPNIYDKLWEEINQVTIDLSTIHGKYSANDTVEENKYYGEFFNQINQLQRFGLFIR

SEQ ID NO: 5023 - protein, 165 aa, Xenorhabdus sp.
AMKRLLVTGAAGQLGRVMRERLAPMAEILRLADLSPLDAAGPNEECVQCDLADADAVNAMVAGCDGIVHLGGISVEKPFEQILQGNIIGLYNLYEAARAHGQPRIVFASSNHTIGYYPQTERLGPDVPVRPDGLYGVSKCFGENLARMYFDKFGQETALVRIGFC

SEQ ID NO: 5024 - protein, 35 aa, Xenorhabdus sp.
MTRPSWPAAPVTRSRFIAILPQRLHVSDTVETLEH

SEQ ID NO: 5025 - protein, 276 aa, Xenorhabdus sp.
VEYVSLYGLFLAKVVTIVLAVVVLVVFCIGVGVRKTMHKGELRLTNLGETYKEKQRQMQQARMSEAELKIWQKEQKKQQKSEAKQKKAEAKSGLKSEPKSSLYVLDFKGSMDAHEVDSLREEISAVLAVADKNDEVLVRLESPGGVVHGYGLAASQLARLKNKGIRLTIAVDKVAASGGYMMACVADRIIAAPFAIIGSIGVVAQLPNIHRLLKKNDVDIELHTAGEYKRTLTMLGENTEQGRQKFREELNETHNLFKSFIHDHRPALEVDKVATS

SEQ ID NO: 5026 - protein, 865 aa, Xenorhabdus sp.
MGKALVIVESPAKAKTINKYLGNDYVVKSSVGHIRDLPTSGTTSQKSSSSSTDKNKKKTKKDEKTALVNRMGVDPYHGWEANYQILPGKEKVVAELKTLAEKAQHIYLATDLDREGEAIAWHLREVIGGDDTRFSRVVFNEITKNAITQAFDKPGELNLDRVNAQQARRFMDRVVGYMVSPLLWKKVARGLSAGRVQSVAVRLVVDREREIKAFVPEEYWQIYADLMAKGGVELHMEVTHKEGKPFKPVNAQQTQAAVSLLEKASYKITDREDRPTSSKPSAPFITSTLQQAASTRLGFGVKKTMMMAQKLYEAGHITYMRTDSTNLSQDALSMVRGYISDNFGDKYLPKEVNIYSSKENSQEAHEAIRPSNVEIMAEALKDMEADAQKLYQLIWRQFIACQMTPAKYDSTTLTVQAGDFELRAKGRTLRFDGWTKVMPALRKGDDDRTLPIVEVGTGLDLQKLLPSQHFTKPPARFSEASLVKELEKRGIGRPSTYASIISTIQDRGYVRVENRRFYAEKMGEIVNDRLEENFNELMSYDFTARMEDQLDHVANNEANWKGVLDEFFTNFSEQLDIASKDPEEGGMRPNPMVITSIECPTCSRPMGIRTATTGVFLGCSGYALSPKERCKQTINLIPENEILNILEGDDAETNALRARRRCSKCGTAMDSYLIDTQRKLHVCGNNPACDGYEVENGEFRIKGYDGPIVECDKCGSEMHLKMGRFGKYMGCTNEGCKNTRKILRSGEVAPPKEDPVPLPELPCEKSDAYFVLRDGAAGVFLAASTFPKSRETRAPLVEELAQFKDRLPEKLRYLAEAPTEDPEGNKTIVRFSRKTKQQYVSSEKNGKATGWTAFFVDGTWTVKEK

SEQ ID NO: 5027 - protein, 786 aa, Xenorhabdus sp.
MKNGLTAMKKNNSLKPIVLWITLLCGLLPATVAIADNGYQEKGQLNSPNSWLSEEFKRQWGLSAIGAHYAYARGYTGKGITVGVLDQAVTPHAEFANKLRRLSPEDQVNFDELFNGLLILFGNHGNHVAGTIAANRDGEEMHGVAFDADLVTAKFLGSYQNRTEAMIQSNARIINNSWGVPPERNRDENGRPIRRPDGTWDYVQVTMDEVRKHGESIRNTLDQLSRSPIPETFDDNSATAGLLRAARHGKLVVFAAGNSNNYNITWIDAGMPLFFPDVLKNYLSVANLTQEKGLALSSTSCGYTASYCLSAPGTDIYSSTGKFISKTGTHINENYLNEGNFDIDSSYGLKTGTSMAAPHVAGAAAVLMQRFPYMTTAQISDVLKTTATDLGEKGIDKLYGWGMLNLKDAIEGPKMFITKDDIPAEFYIKDSYTDTQFVANIVGMGEKVEAGTTVERVCDSIECTYDYWSNDISGHGGLTKTGKGMLELTGKNSTYQGPTIVDQGQLQISGCITSEVTVHKGATFSGNGTVGSLIAKSGSYIAPGNVGPMNTELIGTLKVNNDVTFEAGSNYLVEVARNTAGLSDRIYADGLAKLNGGKVEVKLENSSNLLSKPEVRSLLGQQYNILQAHKGINGQFTAASPDYLFIGTQLSYQPNRVMLDINRNATPFARVTKTANERAIANAAEKLHLGHPVYESILMSDTAAQAGKAFQQLSSGQIHADIASAQINGSRYLRDTLNTRLRQADTGLASQDIQADQNGVWAQISSNWQRTNSNSEANGFRAHGSS

SEQ ID NO: 5028 - protein, 876 aa, Xenorhabdus sp.
VDEALNQGITLFVADNRLQYETSRDNIPEELLNEWKYYRQDLIDFLQQLNAKEETQTYQLQDIQRNRNAEHYPLSFAQQRLWFIDQLTDGSPQYNCPGYLRLREKLNVNAFKAAVKTLLERHEALRTCFKVIDNEPRQVLVTSYDLPITQHDLTMLSENEKEHHIQQLSKEEDNQVFNLSADLMLRIRLIKRAENDYVVLYTIHHIACDSWSIEIFIYELITLYKAYSQGMTNPLPELKIQYSDYAQWQRNWLQGDILEKQLDYWNNQLSGIPPLHRFPLDNPRPAQQGFKGLLKEQHISKDLAQEIKALCHQHEVTLFMFLETAFAVLLSRYSNEKDILVGTPLAGRTHHDIEPLIGFFVNSLVIRTDLSGQPTFSELLKRNSRTIIDAYEHQDLPFQMLVEKISPGRNLNYNPVFQIAFTLENTQRDGTLVRDNNIETEERLLLKTRFDLEIHIYEEEGGGLSLLWVYDSSLFNDITLERLLANYETLLTNIISVVKPRTGSDLIYKEPSVHDIPLLAEAEIHTLSQWNGRQEYNQNSGCFHELFEKQAARYPEKTAIVFGSDSLSYQELNQQANQLAHYLIAQKIKPETLVALCIPRSIRALVALLGVIKAGGAYVPLDPDYPVSRLQYMLEHSEAEFILTETSLIEKLPISQQKVVCLDTEAIQSQLQQMPIDNITERPFSLTENNLAYVIYTSGSTGKPKGVMLEHKGWVNLALSQAKLFGVDTHSRGLQFASWSFDAMILEISMTLAYGATLYLISEAQQHSPECLDEIVETHQITHAVLPPALLPYLNFNKWCSVSTLLLAGEAVPPQLSVHWSQNRKLFNVYGPTECTAIVTSSLLTDEKITIGKPLPNIQMRILDPSGNQVPIGAAR

SEQ ID NO: 5029 - protein, 295 aa, Xenorhabdus sp.
PKIDFQQAGKRVLHIELEGLAELEQYINDDFSKACELMFGCEGKVIVMGMGKSGHIGRKIAATFASTGTPSFFVHPGEASHGDLGMVTPKDIVLAISNSGESNEILALIPVLKRQKVALICMTNNCNSNMGKAADVHLCIKTPQEACPLGLAPTTSTTATLVMGDALALALLEARGFTTKDFALSHPGGALGRKLLLLTSELMTTGDDIPRVPRTATLREGLIEITRKKLGMTVICGDDMQIDGIFTDGDLRRVFDMGIDLNNAKISDVMTTGGIRIKPNTLAVDALNLMQSRHL

SEQ ID NO: 5030 - protein, 193 aa, Xenorhabdus sp.
IFLLLTALFFISIMIKMTVSTQSDDVDSYTQERDAELPDEGNNGIALLWVVLGLLLLPISTRMVIDNATVIARIYGISDLVIGLTILAVGTSLPELATSIAAAIKGENDMAMGNIIGSNVFNMTLVLGVSGLFSPSVISSYAFSRDFWIMMAASVLFTIFCVRRKHRFNRLSGALLFSCFIAYFVALFVMHGD

SEQ ID NO: 5031 - protein, 456 aa, Xenorhabdus sp.
NYPHLFTPLDLGFTTLKNRVLMGSMHTGLEEHPDGTRRLAQFYAERAAGGVALIVTGGISPNPQGVVSAGASVLNSEDELPHHKFITDAVHQAGGKIALQILHTGRYSYQKKLVAPSALQAPINPFIPKEMTEEDIQQTISDFARCAQLAQQAGYDGVEIMGSEGYLINQFLVARTNHRQDQWGGSFENRMRFAIEIVKAVRAIVGEQFIIIYRLSMLDLVEEGSDWQEIEQLAQAIEQAGASIINTGIGWHEARIPTIATMVPRAGFSWVTKKLMGKVKIPLITTNRINDPHVAEQILSEGCADMVSMARPFLADAEFMLKAEQNRADEINTCIGCNQACLDRIFVGKLTSCLVNPRACHETEFIAEPVTSPKTIAVVGAGPAGLSFATTAASRGHHVTLFERENKIGGQFNIAKQIPGKEEFHETLRYFERQLALNGVDVRLITLQQQNNLLRL

SEQ ID NO: 5032 - protein, 292 aa, Xenorhabdus sp.
FSHEASKMIPVVALVGRPNVGKSTLFNRLTRTRDALVADFPGLTRDRKYGRAEVEGKEFIIVDTGGIDGTEEGVETHMATQSLMAIEEADIVLFMVDARSGLMPADHAIAKHLRSREKSTFLVANKTDGIDIDTSVAEFYSLGLGDIHSIAASHGRGVTQLIEHALLPFYADEEGAEKIELTEEEANAAYWAELEQAEQDAVEEAEQEDDFDPTTLPLKLAIVGRPNVGKSTLTNRILGEERVVVFDMPGTTRDSIYIPMERDGREYVLIDTAGVRKRGKVTETVEKFSVLP

SEQ ID NO: 5033 - protein, 253 aa, Xenorhabdus sp.
KVEWEPQVAGKALSRLVLSDSLILIHTGNGMLQALNESDGSIAWSINMDTPPLSVRGESAPAVAYGAAVVGGDNGRVSAVLLSQGQLIWQQRISQVTGATEIDRLNDVDMTPVISDNVIYAIAYNGNLVAMDMRSGQIIWKRDLGSVNDMVVTDNNIFVVDQDDRILSLRKSDGVTIWSQNDLLHRNLTAPEMYNGYLVVGDGEGYLHWLNMEDGQFMAQHKVDSSGLLSRPVIASDKLMVQARNGKVYLYTR

SEQ ID NO: 5034 - protein, 318 aa, Xenorhabdus sp.
MMYIVMDGFDLGIGILYPMVKGQADRDLMMNSVAPVWDGNETCLVLGGAGLFGAFPLAYAVILDALAIPLTLMLLGLIFRGVAFEFRFKSAPKHQPIWDKAFIAGSIIATFIQGVVVGAVIEGFPVENRTYIGGSFDWLSPFPLFCGFGLLIAYGLLGCGWLVMKTEGHLQQKMLRLLRPLTLLMLIVITIVSVWTPLSQPAIAERWFSLPNLFFFLPVPLLVLWSGWKLLVANQKSGHYTPFLAALLLVFMGFSGLGISIWPNIIPPFISYEEAASPPESLGFMLVGALFIIPIILTYTYWSYYVFRGKITHEQGYH

SEQ ID NO: 5035 - protein, 445 aa, Xenorhabdus sp.
MFGLTALELARIQFAFTVSFHIIFPAITIGLASFLALLEGLWLKTRNTDYKTLYHFWAKIFGINFGMGVVSGLVMAYQFGTNWSFFSDFAGSITGPLLVYEVLTAFFLEAGFLGVMLFGWNRVGEKLHFFATCMVALGTIISTFWILASNSWMQTPQGHEIIDNQIVPVDWLAVIFNPSFPYRLLHMGTAAFLASAFFIAASAAWHLLKGHDSSAMKKMLSMAMWLILIIAPLQAFIGDLHGLNTLKHQPAKVAAMEGHWENHPGEATPLIIFGIPDQEAEETRYAVKIPYLASIILTHSIDKRVPALKEFPPEDRLNVFMVFWSFRVMVGLGLLMILAGVWGLWLRYKKRLYQSRTFLRFMLLMAPSGLIAILAGWFTTEIGRQPRVVYGLMRTKDAVSAHGEFHMSISLLIFFVVYGADFGAGYAYMMKLIRKGPNKELTNGC

SEQ ID NO: 5036 - protein, 274 aa, Xenorhabdus sp.
AENLKNRILRHVSAAFAEDPLRVLRLARFAARFAHLDFSIATETQALITEMTASGELSSLTPERVWRETEKALASQSPQVYFQVLRNCGALAVLFPELNRLFDAPLKYTDIDMGVHSLNVLKMSTYLSIDTDIRFASLCTHIESEQIKQLCERLRIPNFVRDLAGIVAQYSGWVHTAQQLSPEKVLALFNAIDVWRKPQRLEQLIICSKADICASTGSKTPLYPSENYLRGAFTVAAQVSVQQIIARGFQGAEIRTELERQRQLAIADWEQSQH

SEQ ID NO: 5037 - protein, 130 aa, Xenorhabdus sp.
MSAIALGMIIFAYLCGSISSAILICRLAGLPDPRQHGSGNPGATNVLRIGGKGAALAVLICDVLKGMIPVWLAYKLNIQPFYLSIIAIAACLGHIYPVFFHFKGGKSVATAFGAIAAIGWDLMGLIAGTW

SEQ ID NO: 5038 - protein, 118 aa, Xenorhabdus sp.
VMDIVFIKELTVITTIGVYDWEQMIKQKLVFDIEMGWDNKRAASSDNVEHCLDYSQVSETVIRHVENQRFALVERVAEEVADILLNQFHSPWVRIKVSKPGAVAQATSVGVVIERRAR

SEQ ID NO: 5039 - protein, 37 aa, Xenorhabdus sp.
QVRRMTAHVGFPTLRLIRFSMGSLQLGDLSPGEWREI

SEQ ID NO: 5040 - protein, 150 aa, Xenorhabdus sp.
LFSPHITVACIVHAKNQFLVVEELIDGKPRWNQPAGHLEADETLLEAAERELWEETGIRAKPQALLKLHQWVAPDGTPFIRFLFLVELEKTVDTDPQDSDIHCCHWLSAEEIINSPQLRSPLVAESIRNYLENQAHPLSILDSYGSPFTK

SEQ ID NO: 5041 - protein, 404 aa, Xenorhabdus sp.
MTFNVIRYWLMISALLVSLFISQLSVMAHAGKPDFVPPAERPLSMNERPWPHNSFVVLAYHDVEDDGADQRFMSVRTSALNDQFAWLHANGYQPITVDQILTANQGGTPLPPKAVLLTFDDGYSSFYHRVFPLLKAYNWPAILAPVGIWVDAPAGKPVNFGGLQVPRERFTTWAQVAEMSRSGLVEIGSHTYQHHYGALGNPQGNTEPAAATRIYDRKTGKYETEKAFRQRMEQDVRTITQRIISATGKKPRVWVWPYGIDSGVTLDIAKQYGYKLALTLDTGLANAKNLDNVPRILLTNNPTLKEFAEQVIQVQNKFPLRIAHIDLDYVYDPDPVQQASNLDKLVQRVADLGINTVFLQAFADPTGDGTVRELYFPNRWLPMRADLFNRVSWQIHSRLNIDVL

SEQ ID NO: 5042 - protein, 163 aa, Xenorhabdus sp.
NGGQIYSRWRYSERSQWSASFAPSFFSDGNNRFAYAINGMQRIYTAPYLKLDATLEVGTTHNSKQNTPYFNPRNDFTLLPALEADHIIYRHYQTVWSQQLTAGIGEYWQKDYGGGLITKVSYGQRIKWNDVVDAGVRLTLDKRPYDGRREKNLQAAFDLTYRF

SEQ ID NO: 5043 - protein, 170 aa, Xenorhabdus sp.
HIWSFSCSYVRVFIVRSVIYDWGNLYLTEYHHYDLVCANFVVSLFEVGGLVGSLVAGWGSDKLFGGNRGPINLIFSIGIFLSVAALWLMPVTDLVFQSLGFFSIGFFVFGPQLLIGMAAAECSHKDSAGAATGFVGLFAYTGAALGGYPFAIILENYHWTGLFITISVCA

SEQ ID NO: 5044 - protein, 58 aa, Xenorhabdus sp.
VAEETLAYEMQLDGEQAYNLLQMTPFAWRASEDVKNHLVAKKLFHCEADFTLKVYQHI

SEQ ID NO: 5045 - protein, 185 aa, Xenorhabdus sp.
MPFEDLETKRLLLKKLAHTDAIHIQQKFPHWDIVKYLDKKAVPWPYPDNGGDIFVNNVAIPAIQEQKAYIWSLRIKAKPNEFIGVIGLYNTQDNNRGFWLSLEYQGHGFMREACEKVTSYWFTELDRTVLRVAKAKVNDKSRNISLSEGMKVIRTDKKEYVSGEYDNEIWELTREEWLNRQISQR

SEQ ID NO: 5046 - protein, 203 aa, Xenorhabdus sp.
WNYPTEAVLMNFYATLILALALSMDAFAAAVSKGATLHRPHLREAIRTGLIFGLIEACTPLIGWSLGIYASQYIMEWDHWVAFTLLFVLGCRMIRESFRHDPDVVTKPTAPRRHSSVTLIFTAIATSLDAMAIGIGLAFLQVDILPTAMTIGIMTMIMATLGMLIGRYIGPLLGKRAELIGGFVLIAIGFNILFEHLKLFMYA

SEQ ID NO: 5047 - protein, 100 aa, Xenorhabdus sp.
VAQSPPADFVVADKGYDSQALRTYIEEQGATAVIPYRKNSRNSDKKWDKDLYRYRHLVENAFARIKHFRAIATRYDKLARNYASTLALAFIIIWLPMWVE

SEQ ID NO: 5048 - protein, 84 aa, Xenorhabdus sp.
MFMSGQVKNTALYENSDYDTAIKKASETNDVLYQQKGLDIITKDSPVIPIYYYVNSKMVKPYVGGFYVTPMGYVSTKDLYIIEH

SEQ ID NO: 5049 - protein, 118 aa, Xenorhabdus sp.
HLNLSKGQTHDMVHAESLVAQSPPADFVVADKGYDSQALRPYIEEQGATAVIPYRKNSRNSDKKWDKDLYRYRHLVENAFARIKHFRAIATRYDKLARNYASTLALAFIIIWLPMWVE

SEQ ID NO: 5050 - protein, 308 aa, Xenorhabdus sp.
VKRVKNNKPQQEQDVPIIWSAILDKTSLPVKDPHLFTKQNDKTNSQGQAKFTMYSDKGGFDNIIVTALMDKNYLFEPNDKNKPITVSILTIPKNEEDILLLPYNFNGHQQAQSGEIKTQSISTRDLNFGWNKLKFLTIVRNNTDVQGATPYFYPDDNNKIVAHQATANKEAYLEVTKTDRINAKLQSRWNFPSGRYLLYQTTINMDFMVFPDPGGNGGRTVGAQRITPVTHCTEFQDVKDTDMSQGIRDSMLSKKVDLKFAGLLGSNSNFSVYNYIGLDGANSTYTQTYPIAPVSENVENVYIMLCKK

SEQ ID NO: 5051 - protein, 403 aa, Xenorhabdus sp.
NSVDKVDTVFMLINTNPFDFNTKPRYAYIYGGCCAVKNVLSLMSQVIVSFSLVWVLWIIYGYSLSFEAGNPFFGGFKQVMLKDISITDLSGSFYQLIYVVFQGAFGCITVALIVGALCERVRFSALLIFIVLWFTASYIPMVHMVWGGGWLAQDGALDFAGGTVVHINAAVAGLVGAYLLGKRSGFGKESFKPHNLPMTFIGTAILYIGWFGFNVGSAGAVNAIAALALVNTMAATAGAVLSWVFSEWIFRNKPSLLGACSGCIAGLVAITPAAATVGIGGALVIGVIAGITGLWGVVVLKRWLRVDDVCDVFGVHGVCGIIGCLLTSIFTASTLGGTGFSEGMTMLKQVGVQSVSILVCVIWSAVAAYLSFKIADKAIGLRISIESEREGLDITAHGESAYN

SEQ ID NO: 5052 - protein, 178 aa, Xenorhabdus sp.
MKQLLDFLPLVVFFVVYKMYDIFYASGALIAATGLAVVITYAVYRKVEKSSLITFAITAVFGTLTLTFHSDLFIKWKVTVIYAIFALALLISQWVMKKPLIQKMLGKELELPDAVWNKLNTAWAIFFIVCALANIYIAFWLSMDVWMNFKVFGLTALTLVFTVLSVIYIYRHLPREQE

SEQ ID NO: 5053 - protein, 142 aa, Xenorhabdus sp.
MTQQQCLPNGELVLRTLAMPADTNANGDIFGGWLMSQMDIGGAILAKEIAMGRVVTVSVNGISFLKPVAVGDVVCCYARCLKTGNSSITIHIEVWVKKVASEPVGQRYRATDAVFTYVAVNENNTSRPLPEGKRNFKLESSN

SEQ ID NO: 5054 - protein, 465 aa, Xenorhabdus sp.
MLGKRLYRWMPGLESLCNYRKEYFSHDIRAGLSVTAVALPVAIAYAELMGISAIIGLYACILPMFVYALFGTSRQLIIGPDAATCAVIAAAVTPLAFGNADVRWQLAIIMTLMTGIWCILASHFRLGAFADFLSRPILKGFINGVAITIMAGQITKVFGISGLPSELIEQLIALPHKLLESHWPTMGMSAMTLFVLLSVRFLRPGWPAPLLAMIISTYVSWQFELNQYDIQIVGHMKDGLPIVPMPEFEFGSIRDLVVPSINLAVISFVSFMITARSFASKNGYQVDADSELRALGIANNASSLSQGFAVSAASSRTAVNDAVGGKTQMVSIISAIAILLVLFFMTEFLSYIPLSSLGIVLIFSTWSLLGLRNIWAYRKRNRQAFILSIFTLVAVLLVGVIDGIGFAVLLGLLQFLRIIFRPSDQLLGVNEQGTIRSINQGNDIGPVDGIVMYRFNSPLIYFHAG

SEQ ID NO: 5055 - protein, 192 aa, Xenorhabdus sp.
APKEMEPAMPASISEPEPEPPVPEPEPESIAKIALPEPKPEKKPVEKKREEKKIAKKESKPKEIRTEKMSEEAVKPITDQEPLLTNNVDGKKSTDPVTSEKSEVQSGPKALSRIDPVYSDRARQLGIEGSVQVKYDIDENGRVKNIEILSAEPKNLFDREVRNAMRKWRYEKKPATGYVTTIEFKLTGVSVS

SEQ ID NO: 5056 - protein, 82 aa, Xenorhabdus sp.
MLRILTDRGTEYCGRVEYHDYQLYLAVNDIDHTKTKARSPQTNGICERFHKSILNEFYQITFRKKLYMSLNELQTDLDEWTL

SEQ ID NO: 5057 - protein, 141 aa, Xenorhabdus sp.
MAINLKKENTRMYDIHVVLSNTPGALALLGSLLGKNGVSLEGGGVFTIGNESHAHFLVEDGELARQVLMAAGLDVRDVVKPLIRKLNQERSGELGEVADAIARAGINIITQYSDHNNRLILLTEKNEFAANVTIKWDVSQE

SEQ ID NO: 5058 - protein, 633 aa, Xenorhabdus sp.
MKKAFLFTPALLALSISTISHAHAYDNLYVFGDSLSDTGNTKGVERFTTDGKTSQLYNEYLAKKLANIELKPSSEKGGTNYSQAGSTALKEYSERGLGTKEQVSQYLAQHNQQADSNGGYIHWVGGNDLAAALIAGSKNPKDPSESYDIVGKSATEASRQITQLVNAGAGLVIAPTVPDVGTTPRLLETVIKTGLEENNVDENTINGALQKIHQGVNKYDIPSGQAREFALQTQLFSTLAQEAQKILKEKAEKTEKETGKKIDVPSAADIEKKLKFEYNKASEGATKLTDAYNKLVDEKISQSNGNILRADINGLLKEVIDNPYSYGIQNTLGYACPQGQSASECVSKIDGKDNPEFNNIREFLFSDNFHPTPLAHKIMGQYIESIYIAPSQVMTLNQVNRAPVKGTRASLDGHLQQLRSGGNEQGKTGVFGGYSGGRNTTFTLGGDYQLTERLLLGALYSNDNTERSPTSNFSYQSDAHVATAYGLWNVFNKAWLSGDLHYADINYDSLTRSVKLGQATRREVGSTTGRQWGARLTANWDIPVTNIVTTSPIVQFSWDKGDVKGYRESGHESSAMHFSDQRYTSKIATLGWRVDTQLGRFNPYASVQFNHQFGDTQSKMRSAINSTQTSLEH

SEQ ID NO: 5059 - protein, 300 aa, Xenorhabdus sp.
TYVLSNRLYTSLGDAAVGRFSDGEVSVQINENVRGGDVFIIQSTCAPTNDNLMELVVMVDALRRASAGRITAVIPYFGYARQDRRVRSARVPITAKVVADFLSSVGVDRVLTVDLHAEQIQGFFDVPVDNVFGSPILLEDMLQKGLENPIVVSPDIGGVVRARAIAKLLNDTDMAIIDKRRPRANVSQVMHIIGDVAGRDCILVDDMIDTGGTLCKAAEALKERGAKRVFAYATHPIFSGNAVENIKNSVIDEFIVCDTIPLSDEVKALNKVRTLTLSGMLAEAIRRISNEESISAMFEH

SEQ ID NO: 5060 - protein, 342 aa, Xenorhabdus sp.
MVSIRLADLAQQLNAQLHGDGDIVITGIAPMYSANSEQITFLSDSRYTEKLAECQAAAIVLSEADLPHCKVAALVVDNPYLAYARMAQIMDITPQPAQDIHSSAVISPEATLGRNVAIGANTVIESGVVLGDNVIIGAGCFVGKNTRIGTGSRLWANVSVYHNVEMGEQCLIQSGAVIGSDGFGYANDRGNWIKIPQLGTVIIGDRVEIGACTTIDRGALDNTIIGNGVIIDNQCQIAHNVIIGDNTAIAGGVIMAGSLKVGRYCMIGGASVINGHMEICDKVTVTGMSMVMRPITEPGVYSSGIPLQQNKVWRKTAALVMNINEMNKRLKSVERKLEGDNK

SEQ ID NO: 5061 - protein, 82 aa, Xenorhabdus sp.
MAQATGILAFKTVGTLEPGELYYFAAIDGARFKRPVLPGDQMIMEVEFIKERRGVARFRGVAKVDGEVACEAEMMCARRREA

SEQ ID NO: 5062 - protein, 265 aa, Xenorhabdus sp.
MIDQTAVIHPSSIIEEGAVIGANVRIGPFCYIGSQVEIGEGTELKSHVVINGITKIGRDNQIYQFASIGEVNQDLKYQGEPTRVEIGDRNRIRESVSIHRGTVQGGGLTKVGSDNLLMINAHIAHDCIVGDRCIIANNGTLGGHVILGDYVIIGGMTAVHQFCQIGSHVMVGGCSGVAQDIPPYVIAQGNHATPFGLNIVGLKRRGFDKESLHAIRNAYKALYRSGETLEEARSEIETQAENNPHVKLFSDFLANSAKSSRGIIR

SEQ ID NO: 5063 - protein, 184 aa, Xenorhabdus sp.
KIRYVPQKLNLDPTLPLTVKRFMMLKPGVKSADITPVLERVKAAHLLQQPMQKLSGGETQRVLLARALLNHPQLLVLDEPTQGVDVNGQLALYDLINQIRTELNCAVLMVSHDLHLVMAKTDEVLCLNQHICCSGTPEVVSMHPEFIAMFGHRGAEQLAVYRHHHNHHHDLRGKIILKKGGEPR

SEQ ID NO: 5064 - protein, 30 aa, Xenorhabdus sp.
MSYFGDTLAHASLLGVAFGFLLDVNPFYAV

SEQ ID NO: 5065 - protein, 312 aa, Xenorhabdus sp.
RALKLSWAVFAEDEWQMTNDFTLTSGIRMDKDEKFGIHWTPRLYGVWHLNDQWTLKGGVASGYRSPDLRQVASDWGQGTGGKSKKINGFMEKTAVIVGNPNLKPEKSFNQEISIIWNNQDNLNIGLTVFNTDYKDKITELRRCTDPTGGKDKECTINNEAYKFISDRINVDKANLRGIETTMNWDIVESLSLAANYTYTESEQKSGKEKGVALNKVPKHMVNATLNWQVLPAMETWTRVNFRGKSTEYIYRGQPKSGTPAYTFVDLGMAYSLTKNLRLHGGVYNLFDKSVTQEIHGSTLDGRRYQVGVNYDF

SEQ ID NO: 5066 - protein, 460 aa, Xenorhabdus sp.
MSHNPTATLGTVQASASNRVQLRRTLTLFQVVMMGLAYMQPMTIFDTFGIVSKLTDGHVATSYAIALIAILFTALSYGKLVKRFPSAGSAYTYVQKSMNPHLGFMVGWSSLLDYLLMPMINILLAKIYLQAIFPGIDPWVFVVGLAVLMTVFNLSGINVVANLNGLIVVVQIAVMVVFVGLLMHGIYNGEGAGTLWSARPFTSEEAQLIPMITGATILCFSFLGFDGITSLSEETPNAGKVIPKAIFLTALIGGVIFIAVSYFLQLYFPDVSRFQNPDESQPEIMLFVAGALFQAIILVFSCVTVMASGMAAHAGVARLLYVMGRDGVLPEKVFAYVHPKWRTPSINVILVGIVALSSGFLDLVTATALINFGALVAFTFVNLSVIAQFYVRERRNTTLKDTINFLLLPLFGAGTVGVLWMNLEASSMELGLIWGGVGLLYMFFLTRSFRQPMPQFSEPV

SEQ ID NO: 5067 - protein, 95 aa, Xenorhabdus sp.
MEDRIGQLVMKYPVIWAFEEGTNLIGLTVETEIDKIFFPGDTLIIQRYAAPVKNQPSLIYAPEKGFYLHDVSDGTKKVSIINEQLIGTIIEERIS

SEQ ID NO: 5068 - protein, 173 aa, Xenorhabdus sp.
VIPAAIFFYPLTFILVDILNEFYGLRLARKAILFSFITNILFVLGLMITAGMPGLKEWGLADAYTEIVQSITAVLVASSVAYIVSENVNSWLLCKIKELTNSRYLFIRIITSTTIAAALDSVIFCTLAFYNTLDTDTIKTIIFSQFIIKMTYAIVGVGPIYATRSLFRKYINS

SEQ ID NO: 5069 - protein, 278 aa, Xenorhabdus sp.
MDIQKSITHLGTKTDYRQNYAPELLETLPRSLARDVINIHADSLPFQGFDLWTAWELSWLNSKGKPVVAIGEFTIPATSPGLIESKSFKLYLNSFNQTKFETTEDVIQAMKKDLSQTAGQTVEVKLYPHLDGYGHEIDQFSGQSLDNLDIEIDGYDFDAAILANAVSAEADRVSETLHSNLLKSNCLVTNQPDWGSVVIRYEGAKIDHEKLLRYLISFRTHNEFHEQCVERIYNDIMQYCGPEKLTVFARYTRRGGLDINPFRSNYESAPLTARLIRQ

SEQ ID NO: 5070 - protein, 325 aa, Xenorhabdus sp.
MTTIYSVLYWLAIFLYWLIIAGITIRVLMKRRPVTSAMTWLLIIYIFPLVGIVAYLSFGELHLGKRRVEQAKQMRSSVADWLSDLKKSQHIFANKNSEVAEPLFQLCERRQKIKGVRGNQMQLITSYEQSLKSLINDIETAEHSIEMVFYIWQAGGLVDQVTDALMRAAKRGVRCRIMVDSAGSWQFFRSPYPDMMRKTGIEFVESLKVNIFRLFLRRMDLRQHRKIILIDNYISYTGSMNMVDPRFFKQNAGVSQGIDIMVRMEGRSQRHWVLFMPSTGKWKRASANFRHLLTLISCPLSRHPGTRRRLLPLAPVFLMSLSNNH

SEQ ID NO: 5071 - protein, 189 aa, Xenorhabdus sp.
MPFEQASGHTAQVIASGPGFPDELIQQSLMTAIFAAREQLILTTPYFVPSDDLMHAICTAAMRGVDVSIVVPSQNNSFLVRWASRAFFTELLEAGVKIYQFEGGLLHTKSVLVDGQLSMVGSVNLDMRSLWLNFEITVVIDDELFGSDLMLVQQDYITRSVLLDSDEWQKRPVRQRVLERLCYFFSPLL

SEQ ID NO: 5072 - protein, 110 aa, Xenorhabdus sp.
SLHLDLNNRMTEDEALEKAYDIFLEQAVENLDPADSLLFSLQFEERGGAELSEPSDIWLKHVDFEIDPNFFSEVIIGLAESDEAEIDDIFARILICREKAHPTCRILWKE

SEQ ID NO: 5073 - protein, 62 aa, Xenorhabdus sp.
VWHDTDVFESLLNMIVICIYTNVYPKIDNHAATQEFSYALDTLASTTFCLFTYFHCCGAISF

SEQ ID NO: 5074 - protein, 162 aa, Xenorhabdus sp.
HGGNIIGITQQYGLSADALIDFSANINPLGAPERVKELIKNNLTDIEKYPDVEYRYLHQAIAKAHKCDEAKVIAGNGATELIYAIVRYLNPRLALLLTPGFAEYRRALQQIGTKIIDYPLTEETGFQPDLRLLDMLAAIKPDCLFIATPNNPTGLMPDNQVT

SEQ ID NO: 5075 - protein, 267 aa, Xenorhabdus sp.
MNKGCVWLVGAGPGDVGLITVKGLHCIQSADVIVHDRLVNPELIAQIPEHCEIINVGKEHDYHPIPQEAINEILVKHALDGKRVVRLKGGDPYVFGRGGEEAEILAQHGIKFEIVPGISSSIGGLAYAGIPVTHRDYASGFHIVTGHTSQENKQQNWKILAQLEGTLIILMGMTRLTDICQQLVQHGKPATTPAAVVMYASHPKQESVIGTLETLATKAEEKELHAPALIVIGDVVNLSEMLAFSPSYLNLSSLCPALEDSINGVIP

SEQ ID NO: 5076 - protein, 454 aa, Xenorhabdus sp.
MQQKYAFVIAGTGSGCGKTTVTLGIMRSLINRKLRVQPFKIGPDYLDGGWHCAVTGVASRNLDAFMLPKPILNGLFNEAIADYDVAVIEGVMGLYDGYGTDPDYCSSAAMAKQLGCPVILVVDGKAVSTSIAATVMGFQLFDPAVNIGGVLINRVNRDSHFQLLKQAIENYCGIPVLGRLPVMPEVTLPSRHLGLLPAQEQRNQPTERWSRLAQQVANSIDLDKLLDLTRLSSLPKGDISSLVDPTLGQGLTLALAEDEAFHFYYPDNLLLLEKAGVSIKRFSPLHDHQLPECQMVYLGGGYPEIYARTLVANCAMHTELRQAHQKGIPIYAECGGLMYLGDALIDADGVRHSMVGLISGESRMGDHLKRFGYCEATAMCDTPLIAKGETLRGHEFHYSDFITTQPAVFQCIKKTNTKEDSEKIQKSWQGSYMNGNTLAGYLHIHFAQRLHLLH

SEQ ID NO: 5077 - protein, 213 aa, Xenorhabdus sp.
SIVLGIVAGVALAMLRGFWVNLLAAVLGFFRAIPVIMLIFWTYFLLPVVLGIEIPEITTVVCALALITSSYLAHGVKAGILAIGEGQWRAGLSLGFNRWEVLWHIVLPQALRMMVPSFINQWIALIKDTSLAYIVGVAELSFLATQVNNRSMVYPMEVFLFVALVYFVMCLSLELTANYVARRFSVKCERKGFFTFWSKKELMMVSNANNIKC

SEQ ID NO: 5078 - protein, 106 aa, Xenorhabdus sp.
MAKKPQSELGGLPPELQTDPTDTVNSPDIQPALPEESDNDTQVDGQETPEFVVVKGRTVRHNGVDYPENTVISIFGGEAERLLELGVIMRLDDLRAQLLSSSSQEA

SEQ ID NO: 5079 - protein, 75 aa, Xenorhabdus sp.
VFDRAYTQQVESLDGDSGINTTKPLLGVRDAVFKVPPKQGDRVFIYRLETEFVVNDVQPDSHGGTHLQLNRVVKK

SEQ ID NO: 5080 - protein, 179 aa, Xenorhabdus sp.
MNAAQLRSLVVQALIGKTHAQSRVYSPRDWSTRSEDYPCILVQTPFDHKKSLGRNAPQFHTTTTVRVTGRLEAFDDDLEGGAEQAELALEALREQIERAVINGYALTKVVQQFSEIRSQIDIDASGEGHFAQLLMDIDIEYYQGPEDFYPIEAHSLDGIDVTIAMPEHTPEPHIRINLE

SEQ ID NO: 5081 - protein, 142 aa, Xenorhabdus sp.
MAIPFSRIPNNLRTPLFFVEFDNSMANSATATQRSLLLGQMLDESSAKPAIPVRISSAEQAASQFGHGSLLHGMTTAYLANDVATELWVLPLKDSESQIAARGSIEITSMPTYSGVVSLYIAGQRVQLAVMATDKPAQVAES

SEQ ID NO: 5082 - protein, 436 aa, Xenorhabdus sp.
RTPMKKALFGISTATLLLTSFITNSYAYDTTYVFGDSLSDGGNNGRYTTDGKNSELYDEYVSRHITGKDLTPSNKNGTNYAEGGATALPMPKHHDTTENQLERYLKQHGGKADPNGIYIHWVGGNDITAALLAYNIILDDSKKSNEIVNASANATSNQINTLVKAGAGLIIVPTVPDVGTTPKIMEALIEKELVTMGKTPEQIKEILEKIRQEVNKHDIPSGEAREMAIDKLLEELAKKSGIDVSLLKYAYNKYRQKASEFTDSYNQQVDDKISQSHGNILRADINALLHEVMENPYAYGIQNTLGYPCPQGILADKCSSQDKNFDKDKKFLFSDGFHPTPYVHHVAGQYITSIYTAPFLVASLTSVNQLPVKGVRSFLDGHLQQLRDAGNTPGKIGVFGGYTHSGNDTFTLGSDYQLTDNLLLGALYSYYEDERT

SEQ ID NO: 5083 - protein, 418 aa, Xenorhabdus sp.
GIDPKKIAKDFSEGYANASNGATKLTSLYNSIIDDKISQSNGNILRADIYGLLNEVIDNPFSYGFGNNLGYSCGVDVSATECKSGDKDFDDVIKKIFSDNFHPSPLAHKIMGQYIVSTLIAPSQVMTLNQVNRTPVKGTRASLDGHLQQLRHTGNEQGKFGVFGSYTDNRHDSFTLGSDYQLAENFLLGALYSNNKFDRSSVSNFTYEGNGHVATGYALWNLFDNAWLSGDIHYARINYDSLTRSIQLGQANRKETGSTTGKQWGARLTANWDIPVTDIVTTSPIVQFSWDKGDVKGYRESGNNSSAMHFSDQNYTSKVGTLGWRVDTQLGRFNPYASIQFNHQFGDTQYKMRSAMNKSDKLSFVVDSSKQSKDWRQYTIGANANLFGNIHGFAFVTRNEGSSQDPNYNFSLGVSSRF

SEQ ID NO: 5084 - protein, 152 aa, Xenorhabdus sp.
FRGKFQRKIKPIAKSRGERSTKINLAVASYGLPVHFELSEGQTHDMVHAESLVAQSPPADFVVADKGYDSQALRTYIEEQGATAVIPYRKNSRNSDKKWDKDLYRYRHLVENAFARIKHFRAIATRYDKLARNYASTLALAFIIIWLPMWVE

SEQ ID NO: 5085 - protein, 129 aa, Xenorhabdus sp.
MVSSLYIVLGALLLIKLSLDVIKLRTQYQVAYGDGGFYELQTAIRVHGNAVEYIPISLLLLLVMEMNGATVWMLHICGILLLAGRLLHFYGLKQRELRWRRMGMGATFMSMIIMVVANIYYLPWEPIFS

SEQ ID NO: 5086 - protein, 244 aa, Xenorhabdus sp.
NQRDSLFSAPIANLGDWSFDERVAEVFPDMVKRSIPGYSNIISMIGMLASRFVTPDSQIYDLGCSLGAATLSIRRNINVDGCCIIAVDNSPAMVERCRRHIDAFKAKTPVEIIEQDILDTDIQNASMVVLNFTLQFLQPDDRQKILNKIYAGLKPGGVLVLSEKFNFEDQNIGELLFSMHHDFKRANGYSELEISQKRSMLENVMRTDSVETHKSRLKQAGFQHSEVWFQCFNFGSLLAVKGAE

SEQ ID NO: 5087 - protein, 67 aa, Xenorhabdus sp.
MIDFGNFYQLIAKNHLNHWLECLPAQLNHWQKASLHGQFSSWLKNLDNLLEIQPSHLDLKNGVIAFR

SEQ ID NO: 5088 - protein, 72 aa, Xenorhabdus sp.
LHLIESAIAESWITRKPTTDGFVTSLELFDAEGNQIAQLYGQRTEGTPEQAQWRDQVAALPKLQPEKENCVA

SEQ ID NO: 5089 - protein, 264 aa, Xenorhabdus sp.
MLTISASAFSAERIVTIGGDVSEIVFALGEGQHVVARDSTSKNPQEILSIPDVGYMRMLSSEGVLSMRPTLVIASELAQPSLALKQIEDSGVKVIKVTSKASLEAVPEKIKTVAKAVKQEKRGEELITQYQQQLATITTSEIPTKVMFVMSHGGIMPMAAGQKTAADQIIHAIGAQNAMQGFNGYRPLSQEGVIASQPDLLLISTDGLKTLGGMDKLWQLPGLSFTPAGKKKQVVVVDEMGLLGFGIETPAVMKKVREAAEKVQ

SEQ ID NO: 5090 - protein, 333 aa, Xenorhabdus sp.
MSRSQSPSLGLMLLTVLLFILAISSANMGALPLSFKTLWESSLEDPHWQIWLNIRLPRILLAILVGSALAMSGAVMQGLFRNPLADSGLLGISSGAALTVALTIVVPLSLPAGIALYAHIIAAFIGSLLVSFLIFSLNKYNHGNMSKLLLAGIAINTLCASFIGVLSYISDDQQLRQFTIWMMGSLNQIEWPTLIIAASIIIPVCLLTLSQSRKLNLLQLGDEEAHYLGINVQRTKFQLLLLSALLIGCAVALSGVIGFIGLVIPHLVRLRFGGDHSWLLPISALGGSCLLLTADTLARTLVAPAEMPVGLITGLIGAPYFLWLILRPSGGRL

SEQ ID NO: 5091 - protein, 260 aa, Xenorhabdus sp.
MQKSLLEAKNLNYFIGQRQIIKDVSLSLNQREVVAIIGPNGAGKSTLLRLLTGYVSPASGECLLQGTSLADWEPQKLARIRAVMRQYSSLSFPFSVEEIIAMGRVPHESTHKKTAINEAIALTECEELKHRNYQQLSGGEQQRVQLARTLAQLWHPEPTGSCLFLDEPTSALDLYHQQHTLRLVHNLTRQRPLAVCCVLHDLNLAALYADKILLLHKGELVASGTPQEVLRDDILKQWYRADLGVMQHPETHQPQIYLRQ

SEQ ID NO: 5092 - protein, 34 aa, Xenorhabdus sp.
MVEEGCEMLGYALCLIATFWYLPSARQQRLMDME

SEQ ID NO: 5093 - protein, 272 aa, Xenorhabdus sp.
MVVFAKKKVVLGIIAAISSSAVLAANAANNGEDKIIVTTASGFQQKIEDAPASISVVSREQLETKAYRDVTDALKDVPGVVVTGGGSKTDISIRGMASKYTLILIDGKRVDTRTTRPNSDGPGIEQGWLPPLSAIERIEVVRGPMSALYGSDAMGGVINVITRKAQKEWKTSLRADTTLTESKNSGNSYQTNIYTAGPVIDGILGLKVSGLFSHRNEDKFFDGFSEQKMRNGAATLSLTPNEQNTFDFEIGRYEQDRNITEGKSGNSSDKEE

SEQ ID NO: 5094 - protein, 262 aa, Xenorhabdus sp.
MSQGLKISRFTAGYPKHPVIENLDANPLPRGKITVLLGPNGSGKSTLLRSLAGLNKANGALLLDGQDLMQMNFAQRAQNVVYLPQSLPAGVHLHVLESVIVAQRASGGTSGDQCEQEVMALLRQLGIEHLALSYLDQLSGGQKQLVGLAQSLIRKPTLLLLDEPLSALDLNYQYHVMDLVARETRRRNIITVVVVHDINIALRHGDHILMLKKGELISEGLPEQVITPDSLAQVYGVKGRIEHCSQGVPQVLIDGLVTDLAS

SEQ ID NO: 5095 - protein, 350 aa, Xenorhabdus sp.
MKQQNECDIKAHYRHILHRRIAWMLLLILVIGASLVLDFTMGPSGLSLSALWQTLVSPESVDAGTRVIVWDIRLPYALMAVVVGLSLGLAGAEMQTILNNPLASPFTLGVSNAASFGAALAIVLGIGIPGIPDQWLISANAFIFALLAALMLDGITRWTKVATSGVVLFGIAMVFTFNALVSMMQFIATEDTLQGLVFWTMGSLSKATWLKLGVMLLVLLTLMPVSMMNSWKLTALRLGEDRATSFGINIRRLRLGTLLRISILTALAVAFVGPIAFIGLIAPHIARLMFGEDHRFYLPASALIGALVLSIASIASKNLIPGVIIPVGIVTSLVGVPFFLSIVLRHRGSV

SEQ ID NO: 5096 - protein, 354 aa, Xenorhabdus sp.
ITSFAWLKTVTNVAGRTVEVPAKVNRILLGEGRLFHSVAVLEGDKPLARIVGWQGDFRKLDPQTYSIYKAKFPEIDDIPLIGNTTADTVSSEKVLTLNPDVAIFGLSGHGPGKHSELVKQLEKAGVPVVFVDFRNDPLKNTLPSISMLGKVLHREEQANAYADFYEKNQKLVTDITSRIPAEQKPSVFIELRAGSIEDCCGTAGNGNMGNFIDLAGGKNIAKEVLPVPLGTMNLEKVITADPYIYIASGAQDPGEKGEGIQMGAQTSPETALAGLKAMTERRGINTLTAVKEGRTHAIWHHYYNSPYNVVVTQVFAKWFYPEQFADLDPQQTLKELHSKFLAVEPAGTYWVSEK

SEQ ID NO: 5097 - protein, 165 aa, Xenorhabdus sp.
MDKYKLYENLSDSLMALLSGEYNLIASLANTSSLLYEHLDNVNWVGFYLVDGDTLVLGPFQGKIACVRIPIGKGVCGTAVEKNSIQRISDVHAFPGHIACDANSNAEIVLPLEINGQVIGVLDIDSTVFDRFDEYDEHGLKALVSRLCEHLGQCVVPKYLQQNVT

SEQ ID NO: 5098 - protein, 54 aa, Xenorhabdus sp.
MVRIIILKHFHNLSDEKMEYQLLDRMSWQRFCRLTDVINIPDRNTIWCFEKRIG

SEQ ID NO: 5099 - protein, 347 aa, Xenorhabdus sp.
MNFFSFEFLGAFVILLFVYWLLQKASRLQNGLLILVSYLFTFSFSANFVYVLFIYTLFIYFLANILSRYLSHKIIFTLLTLGILGCFTVFKYYSFFQEAIQQALGSIGLNVELPVLELLLPLGLSFYVFHSVSYVVSVCKKELSPASLPDVMLYLCFFPSLVAGPINRAKDFLPQIQAPSRIILEPLKALLLIGLAVGKLFLLSATLTENFVNPVFEDPAGYHAGQVLVAIYAYAWNIYFNFSGYTDLVTGIALLLGFRVPQNFNAPYLAENLQVFWHRWHISLSTFIRDYVYIPLGGNKKGAIRKNFNLFAAMVISGVWHGVGINFILWGAIHGLGLIFHNINFRA

SEQ ID NO: 5100 - protein, 235 aa, Xenorhabdus sp.
SASKNSSKMEEYSHSGIKHHLPDLRKYPSGVPRKKAFLNLVVPVIDKHNQQIMRDRKWVLSHHHTSKWSAQDIRRLQRICSDYKMTCTSPQHTNWQKLISRVDIIPTHFVATQAAAESGWGTSELAQKNNNLFGMRCSSCGHSKGKVKGYSVYNTIEDSVIAYMKNMNTHRAYESLRISRARQRTEQKPLNTSKLIDHLHGYSELGAVYNRYLHQVFDGNKELISQVLEYDSYSQ

SEQ ID NO: 5101 - protein, 72 aa, Xenorhabdus sp.
MEGVTGMNNVRNDWHQADIIAALRKRGTTLAAVSRESGLSSSTLANTLSRPWPKGEWIIANISRNTSLRNLA

SEQ ID NO: 5102 - protein, 90 aa, Xenorhabdus sp.
KGAICAADEMGLRVPQDISIIGYDNIRNARYFTPALTTIHQPKERLGQMAFSTLLDRIINKREDAQTIEVHPRLVERRSVADGPFIDYRR

SEQ ID NO: 5103 - protein, 171 aa, Xenorhabdus sp.
MSSSFVEENKKITDQWHRIANDLLQEAGIQINGKRPFDIQVKNPDFYKRVLKQGSLGLGESYMDGWWDCERLDVFFYKILRAGLEHKIPKNFKDILMVVTSRLFNLQSPKRAWIVGEEHYDLGNDLFTLMLDPNMQYSCGYWKDANSLEEAQSNKLRLICEKLQLSPGFRA

SEQ ID NO: 5104 - protein, 46 aa, Xenorhabdus sp.
MKDVSTPLKLIKILSDGEIHSGQQLGQKLRMSRAGINKHIQVIREW

SEQ ID NO: 5105 - protein, 281 aa, Xenorhabdus sp.
VILNRITGVDIQESDTAWNIHVGAGENWHELILYLLKHKIYGLENLALIPGNVGSAPIQNIGAYGIEFKQVCEYVDLIELKTGKQIRLMENECGFAYRDSVFKHEYSNGYAITAVGLKLNKVWNPILTYGGLTKFSHNDVTPEQIFHTVCEMRQSKLPDPAITGNAGSFFKNPIISAELAEKIKSEYPDCPQYHHNEHSVKIAAGWLIDKCHLKGYHIGHAAVHHKQALVLINQGNATGRDVIALAAYVRKQVAEKFNIYLEPEVRFIGNVGEIDAGECIS

SEQ ID NO: 5106 - protein, 143 aa, Xenorhabdus sp.
SFKGDYQTTCALHSYFNISDIEKIQVSGLGRHFIDSITNKKQQSTSEKLIFQGRTDRIYTEPEDFNLISDKHWKRTIEIHHYHHSDIVCWNPGAELSGSMQDMENEGYKTMVCVETARISSPLHSKNGNPGKLSVVLRCRQTS

SEQ ID NO: 5107 - protein, 68 aa, Xenorhabdus sp.
MIPPRSALKKDKQASEYHRRKIDELGDPLLVLDKYVDFSALADTLDRIVPRIISPKGGRPPFPTEVMV

SEQ ID NO: 5108 - protein, 355 aa, Xenorhabdus sp.
MPRPILATIHLDAFRHNLATIRQKVGHSKIWSVVKANAYGHGLDRIWQSLTQTDGFALLDMNEAIYLREQGWQGPILLLEGFFKAEDLQIINKYNLTTTVHSRWQLQAIEEAEFDKPVDIYLKLNSGMNRLGFTPGEYPQIVSMANGIQNIRSVTLMTHFANSDNEMGVNEQFTVVKELRMDGLSHCLANSGAILWHPQTHRDWVRPGIILYGASPSGKWRDIADSGLKPAMSLKSEIIAVHELAQGVKIGYGGRYTTQSPTRVGTVACGYADGYPRHASTGTPVVVDGIRTRVLGAISMDMMTVDLTPCPEATIGSSVELWGAKLPVDEVAEFAGTIGYELLCALARRVPVVVD

SEQ ID NO: 5109 - protein, 433 aa, Xenorhabdus sp.
MKVLILGSGVIGVTSAWYLAQEGHEVIVVDRQQSAAEETSAGNAGQISPGYSTPWGAPGIPLKAFKWLFQRHAPLAIRPDGSLFQLRWMWQMLRNCDADHYAMNKSRMVRLAEYSRDCIKQLRADTGIRYEERLGGTLQLFRTAKQFDSAAKNIAVLEQEGVPYRLLTAEQLTSVEPALDHSSHKLTGGLQLPNDETGDCHIFTKELAKMAEKAGVRFIFNRQVKQILMDGDKVSGIQCDDGVITADQYVIAMGAYSTELLRGLITIPVYPMKGYSLTMPVMDETRSPTSTILDETYKIAITRFDNRIRVGGMAEVVGFNLDVLKSRCETLKMVVDDLYHDGGNIAEASFWAGLRPMTPDGTPIVGPTKYANLYLNTGHGTLGWTMACGSGKLLSDLISGKKPDIAADDLSVFRYTDGFNTKVLRAKHRLHTA

SEQ ID NO: 5110 - protein, 151 aa, Xenorhabdus sp.
NLVEIFIDVDDFCRFFIPQWEQFCLNKGYRLRRRKGHMYPSEIMTILILFHLSHYRDFKNFYLEHIWRYHHHDFPTLLSYTRFISVTPSVLVPLCSYLTQLKGNPTGIAFIDSTRLSVCHNIRIPRHKVFEGTAQRGKTSMGWFYGFKLHL

SEQ ID NO: 5111 - protein, 337 aa, Xenorhabdus sp.
MTLIEHLSVVKETRSDINRQYDLVDIIFLVVRAIMAGTEGWQDIETYGQAKIKWLKEYRTFSHGIPCRHTIARILRAIELDSLLEALLNWVNEQRELGGKSVIAFDGKVLRRAYRNEKKNAIQLVTAYDTERGLVLSQKATATKNGEIQVVRQMLDILNLKGSIVTLDALHCQRETLEKISEKKAYAVVQVKKNQPKLWAAVQSQFQSVFDAGKEQIVTEVKQEAHGRREERYVFQLKPQFTPEMAEKWPTIRSIIAVERHRSENGKGTVETSYYISSLPPRHKLLGHYIRQHWRIENSLHYILDVVFKEDYSRIVLGGQTGLIYTDENPTVRIFII

SEQ ID NO: 5112 - protein, 175 aa, Xenorhabdus sp.
CTRIVYLGKDEQTITTRTMDWKHEIKTNLWIFPRGMSRDGIAGPNSIKWKSKYGSVIASGFDISTTDGINEKGLVANLLWLAESKYPQPNDKRPAVSISLWAQYMLDNYATVAEVVESLEKTPLVVMTDKMEGEDRLATLHLSLSDASGDSAIIEYIDGKQVIHHRVRAYFFSIS

SEQ ID NO: 5113 - protein, 133 aa, Xenorhabdus sp.
LAREHNQKSHLGAIYNELGDIISDVALYLPFCFLPGVSNISLLIILFITILTEFIGVLAQTLGASRRYDGPMGKSDRAFVFGTYGLIIAIFPSALSWSSYLFPLIAILLLMTCYQRVVKALYEIRQIEQSQSR

SEQ ID NO: 5114 - protein, 589 aa, Xenorhabdus sp.
MTQLFKQRIAEEHYFTTSDDVSLFYRHWPQQQIKAEKAIIIFHRGHEHSGRVQHIVDELNLPDFAVFAWDARGHGQTKGIRGYSPSVGTSIRDVDEFVRFIAAEYDIAMGNIIVIGQSVGAVLVSAWVHDYAPKIRAMILAAPAFDIKLYVPFATRGFKLMQKIRGIFFVNSYVKAKFLTHDETRIASYNNDPLITREIAVNILLELYQTSERVVKDASAITLPTQLFISGSDYVVNPKPQHQFYQQLSSPMKEKHVMAGFYHDTLGEKDRHLIFDKIRLFLERIFAIPRYQHDYAQQDIWSYSADEFRALSTPLSHFSPKNFAYQLMRKAMESHLGKASEGIRLGLTTGFDSGSTLDYIYRDQPQGQGIWGKLLDKHYLNSIGWRGIRQRKIHIETLIRQAIRCLHEQKMPVHIVDIAAGHGRYVLDAINEFSKVDSVLLRDYSDINVRQGQAYIEERHLSEKIQFVIGNAFDADSIASITPAPTLGIVSGLYELFSDNNLVRNSLHGLAEAITENGYLIYTSQPWHPQLEIIARVLSSHRENEPWIMRRRTQGEMDALVEAAEFEKLYQLTDNWGIFSVSIAKRVYR

SEQ ID NO: 5115 - protein, 217 aa, Xenorhabdus sp.
MKSIKLHTLAAFLMAAGFTAGACAENIRTEMTSQQVVDSLSKLHVNFSIVDNQAGAHGTNCAILGADWAACNQVNIILTNGDQNIDSADWSLYFHSIRQILRIDHEQYKITHITGDLHRLEPTEKFRGIRANEKIILPIIGEYWQVYSTDFMPRWYATSGDAIPKVLVNTDTEDLSAFLSPFQGEQWKRTTTDHNVLMTPENRFEKNRQMGSLEHMA

SEQ ID NO: 5116 - protein, 309 aa, Xenorhabdus sp.
AQAVCDKLGIELYTINFAAEYWDNVFELFLAEYKAGRTPNPDILCNKEIKFKAFLEFAAEDLGADYIATGHYVRRRDVDGISQLLRGLDGNKDQSYFLYTLSHEQVAKSLFPVGELEKPEVRRIAEEIGLVTAKKKDSTGICFIGERKFRDFLGRYLPAQPGPIVTVDGQTIGQHTGLMYHTLGQRKGLGIGGTKSGNEEPWYVVDKDVANNILVVAQGHEHPRLMSVGLIAQQLHWVDRQSLETEIRCVVKTRYRQQDIPCTVIPLSEDKIEVRFDSPVAAVTPGQSAVFYQGEICLGGGVIEQRIQE

SEQ ID NO: 5117 - protein, 208 aa, Xenorhabdus sp.
VAKNYYDITLALAGICQSARLVQQLAHEGQCDAGAFEVTLNSVLNMNPTSTLDVFGNEAGNLRTGLDAVMGMLNGTNSGLSAELTRYTLSLMALERRLSKNPSAADELAKRISQLERQQAYFEPMSEGMLNSLAGIYVDVISPLGPRIQVTGSPDILRNTLVQAKVRAALLAGIRSTVLWQQVGGSRLQFMFSRQRLVRQAKDILARC

SEQ ID NO: 5118 - protein, 456 aa, Xenorhabdus sp.
MELSSLTAVSPIDGRYGDKVSALRAIFSEFGLLKFRVQVEVRWLQKLAATAEITEVPAFDEKANAYLDEIITNFNEQDALRIKEIERTTNHDVKAVEYFLKEKVAHIPALHQVAEFIHFACTSEDINNLSHALMLKTAREEVLQPQWRQLIDTIKRMAHEYRNLPLLSRTHGQPATPSTVGKEFANVAYRMERQFRQLGQIEILGKINGAPGNYNAHLSAYPHINWHQFSESFVTSLDVQWNPYTTQIEPHDYIAELFDCIARFNTILIDFDRDIWGYIALNHFKQKTVAGEIGSSTMPHKVNPIDFENSEGNLGLANAVFGHLASKLPVSRWQRDLTDSTVLRNLGVGLGYALIAYQSTMKGLNKLEVNEKHLLSELDQNWEVLAEPIQTVMRRYGIEKPYEKLKELTRGKRVDAEGMKNFIDGLELPEEERTRLKSMTPANYIGYAELLVDELK

SEQ ID NO: 5119 - protein, 40 aa, Xenorhabdus sp.
MRLDNDTYIILSNQGNLFHSLVSWKENKLSVHLPNNFHMG

SEQ ID NO: 5120 - protein, 269 aa, Xenorhabdus sp.
VHTIEKTIHLADSFVSYRKDFSENQENSQNPVMLLHGTNSDGNSSFGKIKTPFNRDRAVIIPDYAGCGNSSLPSGELTIEHLAEQVVAVIDDSSDEPVDLVGFSLGAVVAAVVAATHPQLVNRRVLTAPWATNDDPYFRLMFTTWLKLENSDQALATAFGLSHVLSPEFISSLGQDTLNQICARPSEKETDKRIALGLSVNIEDYLTRINKDTLIIGLSHDTLIPPYLVREVHRYVKNSQYREVKSGHAVPLENPTEWVTVINDFLQYR

SEQ ID NO: 5121 - protein, 192 aa, Xenorhabdus sp.
VAKIGYIRVSTSDQNSDLQRNALANIHCEMIFEDKISGRTANRPGLKRALKHLKSGDTLVVWKLDRLGRSVKNLVTLISELNEQGIHFQSLTDSIDTSTAMGRFFFHVMSALAEMERELIVERTNAGLAAAREQGRIGGRPVRFTEEDRQQAARLLHKGHTRKQLSIIYDVSLSTIYKYLPVNLASTSTLSE

SEQ ID NO: 5122 - protein, 218 aa, Xenorhabdus sp.
MGSLHGEGDISASGYTVGTTSTWVGNNKFYLDGLAQVTYFNNDLNSKTASRPLGKNKSALGYAFSLETGQGFELSPKWTLAPQAQLTFSSIGINDFHDTFEAKVRFAQSRSMKLRAGATIDYSQKWHDVQSKKEKSTNLYGFLNIRQELLGHNDKVNIANVAFHHGNERLWGEAGTGGSYSWDNRKSFVYGQTSANTSLNNFADSYELSAKIGIKVMW

SEQ ID NO: 5123 - protein, 818 aa, Xenorhabdus sp.
TIDGNVELGGTTLYISGPNAALKGNVSGAKNSIVIIGEKVATTGNTDFAYTHDMNVGSVNILPGKVLRLGDGHKTGNIASDIDNGGSLYFNRSDKVTYNHIISGTGSVYQVGNGTTTLTGINTYKGATNVEGGMIVVNGQVGTTTSTFNAKKGGTVGGTGLINSVTMIENGGRLIGHQDNTLTFGNDLIFSNGANVGISLGAENISVPTLFDVKGNLTLAGTLDVTDLGGFSVGEYDIFNYGGKLNYDSKLPDYGMTLLTGGKPGSLSLTHRNNKVYLINTAGIRLNYWDGDNASKHDNGVIDGGNGIWQVGGPDNWTLKEGKLTGERNTSWSNSDQFAIFSGTAGSVRVDNSGGNVTVNGMQFSTSGYTINGHPLTLKNDPKNSAKIRVGTGKKSATDMVATIESNLTGSATLETTDYGKLILKGESDYNGGTKITRGVLQIGDGSTKGSIVGNVVIGSEGTLIFNRSDDITFGGNITGEGKLVQNGTGTLTLTNANSHTGMAEVQRGTFRQGKEGAFSPTSLYDIGQQGKLDTGGFSATISALNNSGKVLVGGDNKTVGRTLTIKGDYKGNNGTVTLSTVLGGDNSKTDKLVVKGNTSGSTYLVIKNAGGNGAPTNEGIKVIDVEGKSNGTFTLSGDYNYKGEPAIVAGAYAYRLYKNGTNNFDGNWYLRSSLTSTTPNPNPNPNPNPEPIPKPPRLYQAGVSVYEAYGRVLQTLNEPGSLRDRADGYEDRLRGVSVSRNAITGDKIDDNIGQIPNGLLERNFNFFMANYSPRVSTSGDDAITYNMRRAQIGMGKPFYENDSRRSGWWGFSAILEY

SEQ ID NO: 5124 - protein, 150 aa, Xenorhabdus sp.
AYLPVDPNYPQERVNYMLKDSGVTVIISDEVNPSLSEQSYVVIDGSRISIHEHIKQPNLSATDSLAYMIYTSGSTGQPKGVMINHNSAVNRIEWMQERYPLNSTDVILQKTPISFDVSVWELFWWSISGASGHLLPPGAHKEPREIINAI

SEQ ID NO: 5125 - protein, 260 aa, Xenorhabdus sp.
MSKETNKVFRLHSDFEPGGDQPEAIRKLQDGLEDGLAHHTLLGVTGSGKTFTIANVIANMNRPTMVLAPNKTLAAQLYSEMKEFFPENAVEYFVSYYDYYQPEAYVPSSDTFIEKDASVNEHIEQMRLSATKALLERRDVVVVASVSAIYGLGDPDSYLKMMLHLTNGMLIDQRSILRRLAELQYTRNDQAFQRGTFRVRGEVIDIFPAESDEHALRVELFDDEVERLSLFDPLTGQGEYNVPRYTVYPKTHYVTPRGAY

SEQ ID NO: 5126 - protein, 896 aa, Xenorhabdus sp.
MSSKLKTDCASTLSINSETSGSKTYHYYSLPLLSEQLGEISRLPKSLKVLLENLLRNIDGDSVVEDDLKALVAWQRSGHAEREIAYRPARVLMQDFTGVPAVVDLAAMREAVLRLGGNVDQVNPLSPVDLVIDHSVMVDKFGTEQAFEENVQIEMERNYERYLFLRWGQKAFNRFRVVPPGTGICHQVNLEYLGKAVWYENRDGRDFAYPDTLVGTDSHTTMINGLGVLGWGVGGIEAEAAMLGQPISMLIPDVVGFKLTGKLREGITATDLVLTVTQMLRKHGVVGKFVEFYGDGLADLPLADRATIANMSPEYGATCGFFPVDDITLSYMRLTGRSEDEITLVEAYSKQQGLWRHAGDEPIFTSSLELDMSTVEASLAGPKRPQDRVALGGVPHAFQSSIDLDINRKQGLQSSIPVTVDNQTFSLQEGAVVIAAITSCTNTSNPSVLMTAGLLAKKAVEKGLQRQPWVKTSLAPGSKVVTEYLNLAGFMPYLEKLGFNLVGYGCTTCIGNSGPLQDEIEAAIKQSDLTVGAVLSGNRNFEGRIHPLVKTNWLASPPLVVAYALSGSMKRDLTSEPIGQDQQGRDIYLKDIWPSSKEVAEAVEKVRTEMFHKEYSAVFDGDENWQALEVESSATYSWQPDSTYIRLPPFFSHMTQEPEPVTDIHQANILAILGDSVTTDHISPAGNIKADSPAGRYLQDHGVAPKDFNSYGSRRGNHEVMMRGTFANIRIRNEMVPGIEGGYTRHIPSQSQLAIYDAAMRYQEEKKPLAIIAGKEYGSGSSRDWAAKGTSLLGVRVVIAESFERIHRSNLIGMGVLPLEFPQGITRKTLNLTGDEFIDIGGLNDIKPGQIIVVKITYPNGEVTQVNAHCRIDTNTELAYFYNGGILHYVIRNMLK

SEQ ID NO: 5127 - protein, 271 aa, Xenorhabdus sp.
MDNEIIIKRENYLNQIKQAEQFFCHNIEDHFTLSDHRFSDADGLVQFVIASQLNEKSNVMKKMDDIKKTQIALSSIATDYIIRYSDTRGRQYRTDVQFWGDIMGKLPLMSVRNIEKQTYQHVMKGFSIATNLLQLIMDIVVNTNSPGMKSFSQFLQKQGDAIRLGLKKNDDRYSTITLASIIEAVGNDNQVIYIPKIKLFKLDFDRANSEVTSNCASNEAINVEFNYSSCVSLFDYQALEDPEIKSDFESFLLKNKRASIEKSDNFFSGEF

SEQ ID NO: 5128 - protein, 101 aa, Xenorhabdus sp.
LLNKIRAYALQDKGVDTVEANHQLGFAADERDFTLCSDMYKLLGVRAIRLLTNNPQKMEIMVGAGINIVERVPLIVGRNPNNAYYLDTKARLMGHLLSKSS

SEQ ID NO: 5129 - protein, 411 aa, Xenorhabdus sp.
MKSFDSEKFRCQFPALQPSSEFPEPAVFLDSAATSLKPACMIEATQCYYQNHSATVHRSQHATAQAMTERYEQARSLVAELISAPQPENIIWTKGTSEAINLVAQGYFRSRLSAGDEIIVSEQEHHSNLLPWLILAEQTGAKVVKWPIGTNKQKRYQPEIDTLATLLNEKSRLVAISQMSNVTGAAVDLEQVTSLAHQYNCLVLVDGAQGIVHSPVDVQRADIDFYAFSAHKLYGPNGLGVLYGKGTLLNAMSPWQGGGKMLTQVSFDGFTPEAVPYRFEAGTPNVAGVIGFAATLEWLKTVDIPLAESYAVALTDYAEQQLSAIPGFTSYRSTGSSLLAFNIADIHHSDLAMLIAEQNISLRSGQHCAQPLLDALGIDGCLRASFMPYNNKSDADKLVSAVKFALSLLED

SEQ ID NO: 5130 - protein, 145 aa, Xenorhabdus sp.
APHPFGTEITEQQLMETFEQCRLWEDRYRQLIGLAKKLPALPDELKQQQIEITGCENRVWLGHQLLAENRLHFYGDSEGRIVKGLLAFILTIVEGKTPEQLLQTPLIELFQQAGLEQQLSGSRVNGVKSLINAIQEIARTYQNRS

SEQ ID NO: 5131 - protein, 270 aa, Xenorhabdus sp.
MQVSLSDAYLQRFAGTARLYGQKALSLFARSHVCVVGIGGVGSWAAEALARTGIGAITLIDMDDVCITNTNRQLHTLVQNVGLAKTDVIAERIRAINPECRVTCIDDFVTPDNVAELISADFDYVIDAIDSVRPKAALLAYCRRYKIPVVTTGGAGGQLDPTQIQVVDLAKTVQDPLAAKLKERLKSDYRVVKNGKGKLGIDCVFSTEQLVYPQSDGTVCAAKSTADGSKRMDCASGFGAATMVTATFGFVSVSHALKKMVAKAERENRL

SEQ ID NO: 5132 - protein, 88 aa, Xenorhabdus sp.
LREQGYRVHIQRKAARNKPLSHCQKGRNKKIAKTRARVEHIFGSLSQMGEKIIRTIGQLRANFAMTMKATCYDLQRLVYFGKSGIHAF

SEQ ID NO: 5133 - protein, 106 aa, Xenorhabdus sp.
KAAQTFGAILGAVAGSVVGYNAGSGSGAGTAAGAVGGGALGAAAGSVVKDKVIVEGVSLTYKEKTKIYTSTQVGRTCQFTPGLALVITTKANETRIQPNAACPDKK

SEQ ID NO: 5134 - protein, 180 aa, Xenorhabdus sp.
MVKKIIISSLLISLSIPVFASSLQDQLSAIAQAENEGKAGEQKQQTERQIQREKAAKVERERQQREAAARAEKIRKQEATREAEKQRVLAEAKADKKRDQDYEDELRKLEIEMKKLEIEKRSARVKRENEFIDQELKTQAAQTDVIQSEADVNRNLSSGAKSLLESEGKAREKQSSGWFK

SEQ ID NO: 5135 - protein, 141 aa, Xenorhabdus sp.
MRQRTIVCPIIQNNGEYLLCKMASDRGVFPGQWALSGGGMEPNETMEAALRREIREELGEALEITEVKPWAFRDDIRIKTYPDGTTEEIYMIYLIFDCISTNRNITFNEEFQAIAWVSPEAMKTMDLNEATRVTFTLKGII

SEQ ID NO: 5136 - protein, 283 aa, Xenorhabdus sp.
MWLAGAIFILTLILVIWQPKGLGIGWSAVIGATLALITGVVHISDIQVVWQIVWNATAAFIAVIIISLLLDESGFFEWAALHVARWGGGRGRWLFTYIILLGASVSALFANDGAALILTPIVIAMLLALGFSRGATLAFVMAAGFIADTASLPLIVSNLVNIVSADFFKLGFHDYASVMVPVDIAAITATLAMLHWFFRKDIPKAYDVAKLKLPREAIRDMRTFKTGWIVLALLLMGFFALEPLGVPVSLVAAVASLVLWLVARRSHVINTGNVLKKAPCLEH

SEQ ID NO: 5137 - protein, 241 aa, Xenorhabdus sp.
VMKAPKPKPLIYPFENPSITAGLAAINATDPPFKVEPHHLTSWFKEGIIARYVLLNDIREMWGKEALRAEFEAIFGEAKHCTLIASKRSDRDWDTLEDIEMATYSVHAIDTAAALYVEAEISAPSITPEDIGSDEQSGEKAVFNYPMPEPVLPRYEAEKIYSMLHNQPISEKEPRMKVTSNICTALVESLSKHGFTEKDFKGSIKQLQSKMANKGFNGVLTSVTDKTLIDWLKKGGVRPEK

SEQ ID NO: 5138 - protein, 49 aa, Xenorhabdus sp.
KVMENNPIALRLKELETLESIAERINQISVYGGLDQVLNGLVQIKGEQK

SEQ ID NO: 5139 - protein, 408 aa, Xenorhabdus sp.
MKTNAYNLLTQESGAPVKMWTNGVPVDPKAITQLQNTAKMPFVFKHLAVMPDVHVGKGSTIGSVIPTRGAIIPAAVGVDIGCGMIAVRTSLVASDLPDNLLNIRHTIEAAVPHGRTVNRGGRDKGSWNKVPDVVDQHWATLADRFKHITDKYPKLLNTNNRQHLGTLGTGNHFIELCLDEADRVWVMLHSGSRGVGNAIGNLFITLAQKDMQQHIANLPDRDLAYFEEGNRYFDDYMEAVDWAQDYARHNREVMMHRALEALSREIPKPFTTQQEAVNCHHNYVQREQHYGEEVLVTRKGAVSARKGQMGIIPGSMGAKSYIVRGLGNEESFCSCSHGAGRVMSRTEAKKRFTVNDQKRATSHVECRKDSDVIDEIPMAYKDIDAVMAAQSSLVEIVHTLRQVVCVKG

SEQ ID NO: 5140 - protein, 103 aa, Xenorhabdus sp.
MRVRIKRELYKIEKKYGVRILYACESGSRGWGFASPDSDYDVRFIYVHPVDWYLKVEAGRDVIEQPINDELDISGWELRKALKLLKQANPTLMEWLDSPVIYS

SEQ ID NO: 5141 - protein, 173 aa, Xenorhabdus sp.
LQRSLTNRHIQLIAIGGAIGTGLFMGSGKTISLAGPSIIFVYMIIGFMLFFVMRAMGELLLSNLHYKSFSDFAADLLGPWAGFFVGWTYWFCWVITGIADVVAITSYVGYWAPGFPEWATSLLCVLILLTLNLATVKLFGELEFWFAMIKIVAIVALIVIGGVLIGSHFQSPL

SEQ ID NO: 5142 - protein, 315 aa, Xenorhabdus sp.
MIKILEQVRQPTLDLPVDIRRKMWFKPFMQSYLVVFIGYMAMYLVRKNFNIAQNDMVSTYGLSMTQLGLIGLGFSITYGVGKTLVAYYADGKNTKQFLPFMLILSGLAMLGFSMSMGSSGISIFLMVAFYALSGFFQSIGGPASYSTITKWTPRSKRGTYLGLWNMSHNVGGAGAAGVALFGAHYLFDGHVIGMFIFPSIIALIIGFIGLRYGSDSPESYGLGKAEELFGEAISEEDIAAEENQMTKREIFVEYILKNKVIWLLCFANIFLYIVRIGIDQWSTVYAYQELGHSKETAISGFTMFEVGALVGTLMW

SEQ ID NO: 5143 - protein, 112 aa, Xenorhabdus sp.
MRALSGTELSDGTLRYLLWIAALLTPRPPSMMILNEPETSLHPELLPSLAKLIIKASAQTQVWVVSHSPVLISALQHSSLCQTIQLEKQLGETHIIGRDILEEPSWHWPDRN

SEQ ID NO: 5144 - protein, 227 aa, Xenorhabdus sp.
MIAENKNDNQEDIDFMISTLAINNYRSIRDLRITLAPLNVITGANGSGKSNLYRALRLLSETAQGGVVNSLALEGGLDSAFWAGPENFSGAVRAGHMPVQGGVRKEVKRLRLGFATDSFGYSISLGLPHPSSSAFALDPEIKQECIWGGGRYHPAGVLVERKGAISRVRDGRKWQITSEHINSFTSMFDHISDPSMAPEVFHMREFIRGWRFYDHFRTDSDAPARKA

SEQ ID NO: 5145 - protein, 240 aa, Xenorhabdus sp.
QVYHTIRNAILDGRLTERTKIPSTRALAEMMAISRNSVIAGFERLIDEGYLIARKGSGTYVSTTIPDELITTNPSPDYLKRKMISAPDLSATANRLMPFWEKIKLISDQYPIFNIGVGCVDQFPHELWGQLSGRVWRHSKKAIGQFNRPDGYPLLKKVLADYVHSTRGVNCHEDQIIIVNGTQQAINLAARVLLQPDDKVWLDDPGYDSARAIFTSMGAQIAPIPSDEQRMDIAYGATNH

SEQ ID NO: 5146 - protein, 329 aa, Xenorhabdus sp.
MVADLKTPGVYIEENASLALSVSNSPTAVPVFIGKFTPNTVEPNQACIRINNWLEFTSAFSLAPVTDVVIKSSLPSDSGTKKEARETPDVQILAASVAEGETQKWIHSIERINQSLAVEALRLYFQNGGGSCYIYPLNNINNELALAAIPELIEQQGDITLLVCPETEWDYKNRVYDAASSLLNDNKVGYFLIADSPDGESIPSSGTRSRIAAYYPQLETNLTFSALPVDKNVIISGYEDESGKDKLKNLDELRKKNETLARSIDARLKQEQQRQLILPPSSAIAGVYCQTDNQRGVWKAPANVALTGIKGLTDKVDDARQGTMNGKGI

SEQ ID NO: 5147 - protein, 356 aa, Xenorhabdus sp.
MTTVTSYPGVYIEELNNLALSISSSATAVPVFAVNEKNNIIAENTAFRINSWMEYLNKVSNNFDAEDKLSVSLRAYFTNGGGYCYLIKSSNLEKVIPTLDDVTLLVAAGEDIKTAAAILCQPGKGLFAIFDGPEEALTITNVETIKSKYDATAFAAVYYPWLKADWAKITIPPSAVMAGVYASVDLSRGVWKAPANIALKGGLEPAFLVTDEVQGAYNAKRAINMIRTFSNTGITVWGARTLEDSDNWRYVPVRRLFNTIERDVKRTMSFAMFEPNSQPTWERVRAAINNYLYSLWQQGGLAGNKEEEAYFVQIGKGITMTEDQINQGQMVVKVGLAAVRPAEFIILQFTQDVEQR

SEQ ID NO: 5148 - protein, 149 aa, Xenorhabdus sp.
MSTSTSQIAIGYPIPSYRFVVSVGGEQIPFNSVSGLDINYETIEYRDGVGNWFKMPGQHQPINITLRKGVFPGKTELFDWINSIQLNQVEKKDITISLTNDAGSELLMTWNVANAFPTSLTSPSFDATSNDIAVQEITLAADRVTMQVI

SEQ ID NO: 5149 - protein, 581 aa, Xenorhabdus sp.
MLNNNGGPISDYDIPLRTTAPVRIFTEDMTTEFQPYEIDTENSYYYYLLQKTSKAALNLKIYTTQHVRGFIELDTVFNDEEYNQRQTIFMTTVPTNISDNLVPPSIEGTLSSSTLTRPDQADEFTVLISSYEGATAGSYIIGFTTDDKKNVFKIELFAGQITDEEGGYYKFKAAYSDLYSGANHLCYVVLDQTGMPVRSKFNFINYDSSGNNSPDPNDANRTLVAPEIYDQNGQFIDIDKAVNINSIGHKGLEVRLLSDLHKSDTTIAAGDMITVKAYISYCVDTTSSPPRSLPIVVIENPPVQQHEIIDGYYKALIKPEELMGYDASSGDVYSTIAIDYKRVAQNQKSKLFIRNFDTVAPNNSLMTPSLPQSKNGIIDESELSQHVLLIVINQYEKNHIDDHIIVQLKGKTDVLSEPLYIMDKNIHLPNYKIKIPFSNIPLGSYDVSYTITDWAGNSSSSTAKHVEIKNSDSPQQYKEAKLIINGYQLIGNEYVILTIQIHDKQTSELIKDTDISYKLEQAVSITNVVEIDSNPATLQSMNTDEYGQFKINLKGQVGGHCIIRVIANNYIGSVKYIMGQN

SEQ ID NO: 5150 - protein, 406 aa, Xenorhabdus sp.
TPPDNPDLNPDTCSLNGAAAYLYDPNPVTLTGQPPTEDNPFVSASINPMLNNRGGAISDYDIPLRTTVPVRIFTEDMTTEFQPYEIDQENSYYYYLIQKTSKVAVNLKIYATKYVRGGFAELETIFNDERYNQKQIIFMTTVSTNISDNLVPPSIEGTLSSSILTKPDQADEFTVSFRAMRGLQQVVITSGLRQTIKQKLLSQNFSLGKKQVKKPDIINLKLLTAIYILGANHLSFIAFDQTGMPVRSEYNYIHYDSGVTNGLDPNDSTRTLVAPEVYDQYGQFISKHEPVNIYSIGTTGLEVWLKSDQANNPDTTIATGDNVTVTAYILHCVDTGGTPRHLPITIETPSVTLEDGYCKVKISADKLINYKVADGYDVGVLTIEYSRLAPKQKSKIFTRSFATVAI

SEQ ID NO: 5151 - protein, 239 aa, Xenorhabdus sp.
MINNVISPEYDENGRALRRVRSFVRRQGRLTARQQHALDNVWPNMGVDYQPALQDMAELFGRDAPVVLEIGFGMGTSLVTMASQNPEKNFFGIEVHAPGVGACLASAEDENISNLRVMCHDAIEVLENMIPEQGLEMVQLFFPDPWHKARHNKRRIVQPAFAQMIRNKLKIGGVFHMATDWQPYAEHMLEVMSEAEGYRNISESNDYVPRPDSRPVTKFEMRGHRLGHGVWDLMFERVK

SEQ ID NO: 5152 - protein, 108 aa, Xenorhabdus sp.
MAKNRSRRLRKKLRIDEFQELGFSVKWNFPADTSVEVVDSTVDALIEELIEPNGLALDASGYLQWEGLVCLQKIGKCTEEHRQLIDKWLKDRGMEEVATSELFDMWWD

SEQ ID NO: 5153 - protein, 99 aa, Xenorhabdus sp.
VVKVRFSNALLADILDEVRPLIGQGKVADYIPALAEVPINNLAMAICTVDGQVFKAGDAEKRFSIQSVSKVLSLTLAMTRYKEEDIWQRVGTEPWGNHF

SEQ ID NO: 5154 - protein, 90 aa, Xenorhabdus sp.
MSRTIFCTFLQQEAEGQDFQFYPGELGKRIFNEISKEAWQKWMSKQTMLINEKKLNTMNPEDRKLLEQEMVKFLFEGKDIKIDGYTPPEK

SEQ ID NO: 5155 - protein, 345 aa, Xenorhabdus sp.
MEAEQFSQAVLEWYHRYGRKTLPWQLEKTSYHVWLSEVMLQQTQVATVIPYFQKFISRFPDVTSLAAAPLDEVLHLWTGLGYYARARNLHKAAQQVVELHRGKFPTTFDEVVALPGVGRSTAGAILSLSQGKHFPILDGNVKRVLARCYAIDGWPGKKDVENRLWDISTRVTPALGVEYFNQAMMDLGAMVCTRSKPKCEICPLNTGCIAYANHSWANYPGKKPKQTIPEKTAYFLLMQHGDTVWLEQRPLSGIWGGLFAFPQFTDENSLKQWLEDSGISHSQPEQLTSFRHTFSHFHLDIVPIKINILSFDSCMDESKGLWYNLRQPATIGLAAPVEYLLQQLG

SEQ ID NO: 5156 - protein, 66 aa, Xenorhabdus sp.
LKRPFRQLWIARINAAARQNGMSYSRFINGLKKASIEIDRKILADIAVFDKVAFAALVEKAKGALA

SEQ ID NO: 5157 - protein, 89 aa, Xenorhabdus sp.
RKTMSHLTELVANAKAAVEEAQDVAALDLVRVEYLGKKGHLTLQMSSLRDLSAEERPAAGAVINQAKQEVQEALNARKAKLEADVLNAR

SEQ ID NO: 5158 - protein, 69 aa, Xenorhabdus sp.
QEDDMAEQLEFFVIPNPCKGICESGPRGFCRGCYRNREERFMWMKLSDGQKREILRLCHARYLRTLKNN

SEQ ID NO: 5159 - protein, 113 aa, Xenorhabdus sp.
MTTIEKIERQINENPILLYMKGSPKLPSCGFSAQAVQALSACGERFAYVDILQNPDIRAELPKYANWPTFPQLWVDGELVWGCDILMEMYQRGELQALIKETADKYREQEDSQ

SEQ ID NO: 5160 - protein, 167 aa, Xenorhabdus sp.
MSFELPALPYAKDALEPHISAETLEYHYGKHHNAYVVNLNNLIKGTDFAEKTLEEIIKNSDGGIFNNAAQVWNHTFYWHSLSPNGGGEPTDKVAEAINKAFGSFAEFKQQFTDAALKNFGSGWTWLVKKTDGSLAIANTSNAATPLTGEDKPVLTVDVWEHAYLLKL

SEQ ID NO: 5161 - protein, 216 aa, Xenorhabdus sp.
MSNIKDQNMLSGRFRGYYPVVIDVETAGFNARTDALLEIAATTLKMDEEGWLAPADTLHFHIEPFEGANLDPAALAFTGIDPTNPLRGAVSEYTALHAIFKMVRKGMKGSNCNRAIIVAHNASFDHNFVMAAAERSGLKRNPFHPFATFDTAALSGLVLGQTILAKACITAEIPFDSNQAHSALYDTDRTSLLFCELVNRWKRLGGWPLATPDDEA

SEQ ID NO: 5162 - protein, 135 aa, Xenorhabdus sp.
MRLLHTMIRVGNMQRSIDFYTKVMGMRLLRTSENPEYKYSLAFVGYSDESQSAVIELTYNWDVESYEMGTAFGHIALGVDDVAATCERIKLAGGNVIREAGPVKGGTTVIAFVEDPDGYKIELIENKSASSALGH

SEQ ID NO: 5163 - protein, 80 aa, Xenorhabdus sp.
MKDELFLRGHRIPMTKEVVRALALERLQLENARHFIDVGAGTGSVSIEAALRYPALDIIAIERKEDALLLLAENVQLFSA

SEQ ID NO: 5164 - protein, 224 aa, Xenorhabdus sp.
MITVVGVGPGALENQTLSALDVISHADVLVGGKRHLAEFPYFDGDTHPVNADMDTLMQWLEQNQHRKVVVLASGDPLFYGIGKRISQHFSKLSFTKEPHTDEQHNGRKNIRIIPGISSVQYLCAQILLDMNDIYLTSSHGRKPDFDWLLQHEKIAMVTDNVIGPYQIAQEILARGQQRCMVVGENLSHKHEHIRCLTAEQIVQRGDIHYDLNVVIILKGDFDER

SEQ ID NO: 5165 - protein, 382 aa, Xenorhabdus sp.
MNDLIELGTVWHRGKQYRKGYTTGSCATAAAKVAALMILRQQVIHQVSIVTPSGITLALNIEQPLIEGDQAVAAIRKDGGDDVDATHGMLIFARVSLNDSGVITLDGGDGIGRVTRVGVGLPIGWAAINKTPRQTIEETVREVIGPNRGADIIIFAPEGEERAKQTYNDRLGIKGGISIIGTTGIVTPMSEESWKRSLALELETKRASGLDRIIFVPGNHGERFVSQQLGIDASYVVTMSNFVGYMLQEAVRLEFRHIVLVGHVGKLVKIAAGIFHTHSHIADGRMETLIASLALMGAPFELIQAVDQCDTTEAAIELIAEQGWQGVYQQIAQKIGWRIDQMLRFAKSKPQCDAILFSFDNQILGCNRPVDQIVRDFMEGGR

SEQ ID NO: 5166 - protein, 210 aa, Xenorhabdus sp.
YIRQPQQIEKNSFDIISRIIFESYPDFHFVDEEQEAVIKRVIHTTADFDWLNLLYFSPDVFHLIRNGILRGCTLYTDTTMALSGINKTRLAQYGSKCRCYVSDCRTIHMAKAQQITRSMAAVDLALQEPGEKIFIFGNAPTALFRLMEHQVTPIAVVGVPVGFVGAEESKNALIQSGISCIAAKGRKGGSNIAAAIINAILYRMPEVSHE

SEQ ID NO: 5167 - protein, 270 aa, Xenorhabdus sp.
VLLWFVVVGSTWLASYWFLQLAYGLMFWLGCVAEIWLIYTMLAGRSLSDAANAVYQALCKEATDHNKLDISRQELAKIVGRDTSQLQPPQISCAVIETVAENSVDGVIAPLFFLMLGGAPLAMAYKAINTLDSMVGYKTPRYQAIGMFSARMDDVANWLPARLGWLLLAMAAKWQGQDFRQALRIGWRDRYQHSSPNSGWSEATMAGALGIRLGGPNVYFNQLVEKPWIGDAKREVTPEDIPQSVRIMQVASVMALLLFALLYSLFSVMI

SEQ ID NO: 5168 - protein, 73 aa, Xenorhabdus sp.
MLPAGHQLLEAEKDEEPDTEVDYTEQDRPAFVFYLVDIPSIVRNVLTRLSPHPAQSHQRTITPTALDKPLRTL

SEQ ID NO: 5169 - protein, 333 aa, Xenorhabdus sp.
VATMKDVARIAGVSTSTVSHVINDNRYVSESVKKRVHAAIEELNYAPSALARSLKIKQTKTIGMLVTTSDNSFYFEVVRGVERSCYERGYSLILCNTEGDSVRLTRNMETLLQKRVDGLLIMCSEHQSISKDFLLRYPLVPIVTMDWSPFDASSDVIKDNSLIGGELATNYLINKGFRKIACIAGPQDKTPAIQRLSGYQKAMQNAGIEILDGYEIYSNFEFSGGFSSMKQLLQLSDPPEAVFVGNDAMAIGVYQALYQAGISIPEDISVIGYDDISIASYLTPPLTTIHQPKDELGKLAIDMLLYRMDNPDSKPKQLVLTPELIERNSVRER

SEQ ID NO: 5170 - protein, 310 aa, Xenorhabdus sp.
VMSVAKLAVMGSINVDHILNLKFFPQPGETVQGKQYQVAFGGKGANQAVAAGRCGADITFIACVGQDDVGKNICQQLGKDNINTSAIRMIEGESTGVALIFVNQQGENIIGINAGANGSLTPECIHHHEVVIKEADALLLQLEIPLNTVLLAAEMAKKHLTKVILNPAPAQEVSDKLLSLVDIITPNETEAEHLTGIAITDNTEAGKAAQFLHDRGIETVIITLGSRGVWLSEQGKQGKVISGFPVKAIDTIAAGDTFNGALVTGLLEGKDILSAIRFAHAAAAIAVTRRGAQPSIPWRSEIDAFLAEQG

SEQ ID NO: 5171 - protein, 296 aa, Xenorhabdus sp.
MKLKKLVTVLSAVTLYVAMSANALAKDSIALVISTLNNPFFVTMKDSAKKEADKLGYILIILDSQDNPAKELANVQDLIVRGTKLMLINPTDSDAVGNAVMMANNANIPVITLDRIANKGNVISHIASDNRLGGQMAGNFIAEKLGSKVKVIQLEGISGTSAGRERGEGFAQAAKKHQFDMLASQPADFDRTKGLNVMQNLLTARPSVQAVFAQNDEMALGALRALQTAGKKDVLVVGFDGTDDGIKAVEAGKLDATIAQRPDQIGIIGIQTADNVLKGNKVDATIPVELELVIKE

SEQ ID NO: 5172 - protein, 242 aa, Xenorhabdus sp.
ALTGAVAASMIGNDVNALLAVVGTLTLGATIGACTGFIISKGKVQAFIATLVMMLLLRGVTRVYTDGSPINTGFNDNADLLGWFGIGRPLGIPTPVWIMLLVFIVAWFILHHTRLGRYIYALGGNESATRLSGINVDKIKIIVYSLCGLLAALASIIEVARLSSAQPMAGSGYELDAIAAVVLGGTSLAGGKGRIIGTLIGALILGFLNNGLNLLNISSNYQMIVKAVVILLAVLVDNKSSK

SEQ ID NO: 5173 - protein, 297 aa, Xenorhabdus sp.
EEAQFYQQQRDPLDILQQCDIHKALNLRAQQNFGQLAQRVTPKRSLKDLLVSDEIAQQIQEILTAIKYREQVMAGGFKDKIGYGTGISALFYGDSGTGKTMAAEVIANCLGVDLIKVDLSTVVNKYIGETEKNLSRIFDLAEQDAGVLFFDEADALFGKRSETKDAQDRHANIEVSYLLQRLENYPGLVILSTNNRSHLDNAFNRRFTFITRFTYPDESIRKKMWQAIWPENIKVAQDVDFDKLAQQTSVTGANIRNIALLSSLFSAENQYNEINNNNIESALSRELDKVGRLTFKN

SEQ ID NO: 5174 - protein, 298 aa, Xenorhabdus sp.
MQTVIDVNKAMKGILEKYLDKKVAIRFDLPELDTVQSDAMVSVFLYDIHEDLQLRSTESRVFNATSGRLLPGWVNIKCNYLITYWESAKPATDPNSPDSQPDNQAIRVMSQVLNALINNRQLAGIPGAYTQVVPPKESLNSLGSFWQSLGNRPRLSLNYSVTIPISLTDEQDKVIPINTISSTVQQTASLSQERIGHALRELLIMELQRQPVAESENEENIRLALSKVELLAIKEAMASNNSTEISVSLSVSGITHQKYLQGINKIFEFWLNNNKVITTIDDYGICIKSIEKDHLFGI

SEQ ID NO: 5175 - protein, 51 aa, Xenorhabdus sp.
VADLAFMFSDIKEILGEDKLNEVLNCPEFTECNKEFYRVKHAIEFAIGEDE

SEQ ID NO: 5176 - protein, 96 aa, Xenorhabdus sp.
MPALSEYTNVYNTALNILDKKGYRVWYDKELQAYCAEKNGWDFIGNTPCGLLGVIAIYEYKQPEEYKEYWWRDDEKRLYRNIPEEKPEYISIVYKK

SEQ ID NO: 5177 - protein, 558 aa, Xenorhabdus sp.
QSVIAQASALGKEVLLLLSHRGSLLEQWKVFKACVDADKIILMQAANTGLTEGSTPNGDDYDRDIIIISTLRMNKIQFLESANQVVAFPGSTLWHLEKVLKPLAREPHSVIGSSCIGASVIGGICNNSGGSLVQRGPAYTEMALYGRVNEKGEAELINHLGIALGDSPEDILTCLEERRYRAEDIQQNSRVASDHEYAHRVRDIEADTPSRFNADERRLFETSGCAGKLVVFAVRLDTFPAESHTQVFYIGTNQPEVLTELRRHILSNFKHLPVAGEYMHRDIFDIAEIYGKDTFVMIDKLGTDKMPMFFSIKGRLDAIFGKIPFLPPNLIDRVMQWLSGLLPSHLPTRLKTYRDRFEHHLMLKMSGNGIKEASEWLENYFKQADGDYFSCTPEEGAKAFLHRFAAAGAAIRYQAVHSDEVEDILALDIALRRNDQEWFEHLPPEINESLVHRLYYGHFMCHVFHQDYIVKKGRDIKALKEKMLEILNQRGAEYPAEHNVGHLYKAKPQLKQFYQMNDPTNSLNPGIGKTSKLKNWGEVQGEQCPDNCSTHQHGQNNG

SEQ ID NO: 5178 - protein, 37 aa, Xenorhabdus sp.
MIEVTEVLPTAQEYIKLRERAGLSAKSIEAAEKGLPN

SEQ ID NO: 5179 - protein, 468 aa, Xenorhabdus sp.
TFYFHDYETFGIHPALDRPAQFAGVRTDSDFNIIEEPLVVYCAPADDYLPEPEAVMITGITPQLALKKGVNEAEFTRLIHTEFSKPNTCILGYNNIRFDDEVSRNIFYRNFYDPYAYSWQKGNSRWDLLDVLRACYALRPEGIIWPENDDGLPSFKLEQLTKANGVEHTHAHDAMSDVYATIAMAKLVKAAQPKLFDYFFQLRNKQKVSNQIDIPQMKPLVHVSGMFGSLRSNISLIAPLAWHPTNRNAVIMCDLAGDISPLLELDANELRERLYTRRDKLQPDQSPVPIKLVHINKCPIIAPENTLRPQDAERVGLDRNQCAQNLTILRNNPQIREKIVELFSQPEEFPESDNVDAKLYSGFFSDADKTAMEIIRETTPQNLPALDLTFQDPRIKALLFRYRARNYPATLDYGEQQRWLQHRREIFTQENITQYFANIERLFIEHQSDEEKCRQLKALMAYAVQLAE

SEQ ID NO: 5180 - protein, 31 aa, Xenorhabdus sp.
VLPTAQEYIKLRERAGLSAKSIEAAEKGLPN

SEQ ID NO: 5181 - protein, 146 aa, Xenorhabdus sp.
MSIDWNWGIFLQEAPFGNTTYLGWIISGFQVTVALSICAWVIAFIVGSFFGILRTVPNKFLSGLGTCYVELFRNVPLIVQFFIWYLVVPEFLPKNVSDWFKMDLDPNIQFFLSSLVCLGLFTAARVCEQVRAAIQSLPRGQKAAGL

SEQ ID NO: 5182 - protein, 300 aa, Xenorhabdus sp.
IKELYMRKLMLATMLLSAVGAAHAEELTGTLKKIKDSGVVAVGHRESSVPFAYYDGKQNVVGFAQDHSNLIVEAIKKKIGAPDLQVKLIPVTSQNRIPLLQNGTFDFECGSTTNTPERQKQAAFSNTIFIVNTRLLTNKDSGIKGFDDLGGKNVVVSAGTTSEMLLNKLNDEKKMKMRIISAKDHGDSFRTLESGRAVAFMVDDALLAGERAKAKKPEQWIIVGEPQSKEAYGCLMRKDDPQFKKLLDETVAEIQTSGKAAERFDIWFKQPIPPKNLNMNFTLSDEMKELFKAPNDKSLN

SEQ ID NO: 5183 - protein, 437 aa, Xenorhabdus sp.
NWVYVSIAGFGGMPTPVNIFLVVLLAAYLALYPALFAGLLNRFFPASNGLRLLIASPALWQLTEFLRGWVLTGFPWLQFGYSQIDGPLKAIAPVFGVEGITFLLMIISGLLVFATVHKKIVAAIAAVALLMLPWPMRHYQWYTLLPEKSADIALVQGNIPQEIKWNSSALGKTLDIYLDNSRPFIGKVPIIIWPEAAIPDTEHDQSLFLTKLDALLRQYHTSLITGIPDARPTLDGYKFYNSIIVLGEKTPYQYPAADRYDKHHLVPFGEFVPLESLLRPLAPLFNLPMSSFSQGSYIQPQLSVAGYDITAAICYEIILGEQVRDNFKPSTEFLLTISNDAWFGQSIGPWQHFQMARMRALELGRPLLRGTNNGITAVIRPDGSIQAEIPQFTRQVLEAEVTPASGVTPYFRIGNWPVWGMTVLFILFGLTRNRRLT

SEQ ID NO: 5184 - protein, 457 aa, Xenorhabdus sp.
VQKYLNEARSLLALGIPVIIAQSSQTAMGVVDTVMAGKAGAIEMSAVAIGTSIWLPAILLAQGILMALTPIVAHMNGSGQRKNVAGQIQQGFWLATFLSIFVMTILYNCRFIIEAQHNVDPVLAQKSIDFIHAIMWGAPGCLFYQVLRCQCEGLSKTKPAMVIGVIGLLVNIPVNYIFIYGKFGAPELGGVGCGVATASVYWVMCLLLLTYVKHAPSQKDIHTFENFSRPHSHTQKRITLLGLPIGLAMFFEVTLFAVVSLLLSPLGVVDVAGHQIALNFSSLMFMFPLSFGIAATIRVGYNLGQKSTEGAKVSAYTSLALGLIIACITAAFTTIFREPIAMMYNDNPEVVILASNLMLFAAIYQLSDSVQVIGSGVLRGYKDTRSIFVITFIAYWIFGLPSGYILALTNLVTEPMGPQGFWIGFIIGLTVAAIMIGYRILWLQKQPDHAVLARSTR

SEQ ID NO: 5185 - protein, 469 aa, Xenorhabdus sp.
MKKTKIVCTIGPKTESEEKLTELLNSGMNVMRLNFSHGDYEEHGQRIKNIRSVTAKIGKKAAILLDTKGPEIRTMKLEDGNDVSLTAGQTFTFTTDQSTIGNQERVAVTYSGLPADLSVGNTVLVDDGLIAMTVKEIAGTEVICEVLNNGDLGENKGVNLPNVSINLPALAEKDKQDLIFGCEQGVDFIAASFIRKRSDVLEIREHLKAHGGEHIQIISKIENQEGLNNFDEILEASDGIMVARGDLGVEIPVEEVIFAQKMMIEKCNSARKVVITATQMLDSMIKNPRPTRAEAGDVANAILDGTDAVMLSGESAKGKYPVEAVSIMATICERTDRVMGSRIENTKTQKLRVTEAVCRGAVEIAEKLEAPLIVVATYGGKSARSVRKYFPNARILALTTNEITARQLLLVKGVSTQVVKEIASTDDFYRIGKEAALASGMASKGDIVVMVSGALVPSGTTNTSSVHVL

SEQ ID NO: 5186 - protein, 73 aa, Xenorhabdus sp.
MVRIIILKHFHNLSDEKMEYQLLDRMSWQRFCRLTDVINIPDRNTIWCFEKRIGQEGARALFEEAKHQLSFRA

SEQ ID NO: 5187 - protein, 579 aa, Xenorhabdus sp.
VLAPATRIVRCEDLSALVKEAIQSGQIAIPGIDALTFDGTDIRLVDQAGVTHDINLASIAPQSLTSSALSVSLTMKDGTVHTVDLTAAVADAIAKKTLTNAVLTKDNTLVLTLGDGSQVNVDLETLLADTQLVSGSVNSAGDIELVRGDGTTVTIDANALRKVKIDRDSPFTGNGDDVPLNMDFSRVCWKVIDSITMDNNGLHIKIDNQCDAVTLPMSAIQQALADKISVCVGGSGFITGNGQSGSCLDLDLQKIMNALVANANVINTLINSLNNKIAVSTNGTLSGNGTTASPLSVVVSLDKGNLLTLRPDGLYYGQQASKDVSELYVDSVAGDDKNPGSQKQPLKTLQEALKKVPDDQSNNIYLRCGGEYLWPSFAVSNGATRKILAYGDPYIDGNKVPQVTPERRSYHWWVRDAVVRPKIYVQVGYNESIQVYANMAAAPQNGGVLECTGLEFICEGVNDPGTPSAPADFDPKTWVRWSTYMVYGNSSGKVNFYGCKFQGSYAPKILPDNVGEDWWGIVGKDSVGEGAQPKFTACSYINLVTTPGHKKYPNIINVSSGMAQLDIRPYDDSFGDLPG

SEQ ID NO: 5188 - protein, 55 aa, Xenorhabdus sp.
VETLAATGSLVEKADAGSALKAMADAYERDIKADPEKVRMLYANRRVDVDALAKE

SEQ ID NO: 5189 - protein, 248 aa, Xenorhabdus sp.
KTLIVPGLLRQQNSYQKLALLFAIVALFNHGISLKYRVFHVSSGQNLTLLNLGSMVSLLVCIIMTIVAFRGRAWFLLPIVYSFAVINLILASMVPGEFITHLEGSIGLFIHIGLALLGYATLLIAALYALQISWLDNRLKKKKLTFSPGMPPLMTIERKMFHIIQVGVVLLTLTLCTGIMYMDNVFNKENIHKSVLSLLAWFIYIMLLWGHYREGWRGKRVIWFNLIGAFILTLAFFGSRLLQEFMTY

SEQ ID NO: 5190 - protein, 241 aa, Xenorhabdus sp.
SAYFSASETGMMTINRYRLRHLAKQGSNPARRVESLLRHPDRLISLILIGNNLVNILASSLATIVGMRLYGDAGVAIATGILTFVILVFAEVMPKTIAALYPEKVAFPSSLLLRPLQKIMLPLVWAFNKITLLFMRCLGIKASGIRNDSVSKDELRTIVNESNTNLSRRNQDMLISILDLEKVTVGDIMVPRNEIVGIDINDDWKSVIRQLTHSPHGRIVLYRNSLDDAIGIFVCVKPTVS

SEQ ID NO: 5191 - protein, 170 aa, Xenorhabdus sp.
MEKKEFTKKNLIRAADKIYFIPVSTPLNAQLVNFQRNKQKASLAVDEYGDIQGLVTVEDILEEIVGDFTTSMSPSLAEEVLPQSDGTVLVDGTANIRELNKAFDWTLPADGPRTMNGMILEELGEIPELNVQVQINDYNFEILSVNDNVIKKVRVTPMKKGAAKNTKTSS

SEQ ID NO: 5192 - protein, 171 aa, Xenorhabdus sp.
MPLLDSFTVDHTRMSAPAVRVAKMMKTPHGDTITVFDLRFCIPNKEVMPEKGIHTLEHLFAGFMRNHLNGTGVEIIDISPMGCRTGFYMSLIGAPDESKVAEAWKGAMADVLKVQDQKQIPELNVYQCGTYEMHSLQEAQDIARHILDADVRVNKNDELALPEEKLVELQV

SEQ ID NO: 5193 - protein, 414 aa, Xenorhabdus sp.
CFISKEDDITLAQYGQSNIGRFKTLYREGLKNRYGALMQTISGVHYNFSLPISFWQAWLGVKDAESGKEQISAGYFKLIRNYYRFGWVIPYLFGASPAICSSFLRGRDTALSFEQTEKGTCYLPYATSLRMSDLGYTNKSQSDLNITFNSLHTYVKGLKKAIHKPSDEFAALGIKKDGKYLQLNTNVLQIENELYAPIRPKRVAEEGETPSDALLRGGVEYIEVRSLDINPFTSIGVDETQIRFLDLFLIWCAVADSPEMSSEELDCCRKNWNKVILEGRRPDLHVGIGHGIELQPLKVVGLELFADLERVAEVLDSCSESQYQSVCKELVGMFEDPSLTFSARVLERMKTQGIDGFGLELANKYYLELVNEPYSILNDERFSAEREASVERQRNLEQQDNMSFDDYLKLHAGS

SEQ ID NO: 5194 - protein, 208 aa, Xenorhabdus sp.
EPGPEALIGLEGFCELRRELDKQPTQLLDSRIRRFQTFAEIKTEPGPHFGLGFDAYATWTSPIRKYSDIINHRLLKAVIQHTEAEKPAEEICLQLSERRRANRMAERDVGDWLYARYLKPYAGTDKIFAAEIIDITRGGLRVRLVDNGAIAFVPGPFLHSVRDELQCSQETGSVLIKGEAVYRLNDIIDVRLEEVRMETRNIVARPVS

SEQ ID NO: 5195 - protein, 286 aa, Xenorhabdus sp.
TLLPLLSTLIIFPSQASSDNVQQEQIIKQLTTLEQSANGHLGVVLINSADNSTIGYRTNERFPLCSTSKFMAVSALLKKSETDENLLKQRVNYKQSDLVEYSPITEKYIETGMTLAELSAATLQYSDNTAMNLIINQLGSPESVTTFARTLGDTMFRLDRKEPELNLVQPSDERDTSTPQAMAESLYKLTLGDSLAPKQRTQLVELLKGNTTGNASIRARLPKDWVVGDKTGRCDYGSTNDIAVIWPTGNRAPLVLVTYFTQPGDKNAKARPDVLAEAARIMIQAE

SEQ ID NO: 5196 - protein, 107 aa, Xenorhabdus sp.
MDNNSRLVYSTDSGRIQEEKAPSARPKGDGIVRIQRQTSGRKGKGVCVITGIDADDQTIAKLAAELKKKCGCGGSVKDGEIEIQGDKRDLLKQLLEAKGMKVKLAGG

SEQ ID NO: 5197 - protein, 246 aa, Xenorhabdus sp.
MTSHTGQALGKQVESPVVVALDYDNQDAALAFVDKINPQSCRLKVGKEMFTLNGPQFVRMLHQRGFDVFLDLKFHDIPNTTARAVAAAAELGVWMVNIHAGGGERMMTAAKEILLPYGKDAPLLIAVTVLTSMDQSDLLGTGIDVTPAQHAERLAKLTKQCGLDGVVCSAHEAQQLKAACGQEFKLVTPGIRPEGSDAGDQRRIMTPSQAIQAGVDYMVIGRPITRAENPALALQQINESIGIVHG

SEQ ID NO: 5198 - protein, 380 aa, Xenorhabdus sp.
PIAAAYGWYMGRRSAQQDKQQSADRLSREYVDGVNFLLSNQQDKAVDLFLDMLKEDSSAFEAHLTLGNLFRSRGEVERAIRIHQSLMESASLTFEQRLLATQQLGRDYMAAGLYDRAENMFVQLIDEKDFRESALNSLLTIYQSTSDWSKAIEVAEKLVRLGKQQFREEIAHFYCELALQGMREDGFSDAIGYLNKAAQANKNCARVSIMFGRIYMAQKEYTKATEVLKRVLEQDKQLVSEVLPMLQECYRDLVQPEEWEAFIRRCVEENCGAIAEIHLADIIEQKEGRDTAQIYINRQLERHPTMRLFYCLMDYHLVDAEEGRAKESLLLLRNMVGEQIRTKPDYRCHKCGFTSRSLYWHCPSCRSWDTIKPIRGLDGQ

SEQ ID NO: 5199 - protein, 88 aa, Xenorhabdus sp.
  unsure (1)..(88): unsure at all Xaa locations
TLGANNNQVVTFNYLIAKGDYSISTXLSFLFAIGXALGWGICGGFYLRTSMSLRRAKRKIKRLETQLEQPVELSTKTVSQAPVVLDKE

SEQ ID NO: 5200 - protein, 180 aa, Xenorhabdus sp.
MLLKNTSRQFGHVSVLIHWLIALAVYGMFMLGLWMVTLSYYDSWYHSAPELHKSIGFMIFIVMVIRVIWRFISPPPKPLSSYSQLTRISAKLAHLTLYIILFGILFSGYFISTADGQPISVFGWFEIPATLARQGVQADTAGIIHLYLAWLIVVLSLLHGLAALKHHFIDRDSTLKRMFG

SEQ ID NO: 5201 - protein, 216 aa, Xenorhabdus sp.
DRFLQLATQLFEFPRDDLPESLDFIGSLAVDVRDDKTQLKWSDESLPLVIVTQGTLANVDFTQLIIPTLQALSGLPVRVLAITAGRPVEILGKSIPDNVRVVEYLDFEYWLPRSVVFITNGGYGSLNAAIRHGVPMVVAGTGDGKLEAVARVIWARCGISLNTDTPSKQQIYQAVTRILSSGEWYQQAQRLKADYAAHNALETITHHVNTLIASQI

SEQ ID NO: 5202 - protein, 191 aa, Xenorhabdus sp.
MLKKTLIGLTAGVLFMGASSAMASNYKIDTAGQHAFIEFRIQHLGMSWVYGNFKKFDGDFTFDSQNPTADKVSVTIKTDSIDTNHAERDKHLRSAGFLNTAKYPEAKFTSTKVEKVGEQYKVIGELTLNGVTKPVTLQAKLMGEGKDPWGGYRAGFEANGKIKLKDFNIKTDLGPKSQEVELIISVEGVKE

SEQ ID NO: 5203 - protein, 410 aa, Xenorhabdus sp.
MNELGQQLEQRFYRYLAIESQSDASSIIVPSTEGQRKLAELLAKELEGYGLADIYIDEHAILYAVRRGNKPSAPKIGFVAHLDTVDVGLSAVIKPQTLLYEGKDLCLNSQEDIWFKTSEHPEAAPYIGEPIIFSDGTSVLGADNKAAVTVIMELMDKLQQAEFDYGDIYVAFVPDEEIGLRGSKLMDLSRFNVDFAYTIDCCALGEVIYETFNAASVDITITGITTHPMSAKNVLLNPIRVAYDFIGCFDKYDTPEHTEHREGYFYFTNLIANPDNAKIKMAIRDFDRNSYKERKTYVTQSIELIRARHPRAKIDYKIEDVYSNISDSLGDDRTAIDLILEALKIQGITANIIPMRGGTDGSALSARGILTPNYFTGALNFHSRFEFLPISAFEKSYLVTETICRLVGKK

SEQ ID NO: 5204 - protein, 345 aa, Xenorhabdus sp.
SFKVTASYTPSIIDPIMQSFTQDAAQMMAPGYHVNVLCNYFFSLGATFGVILICWFITEKIVEPWLNKNCPVSTNIETDTDKDLERITPEENRAFRIAGSTVLLLGIGLIALLWPETSPMRAPDGSMTSPKAPIMQIVVPLLFLFFAVPGIVYGYLTKSFTSSRDVVKSMENITQSLIPFIVFVFFAAQFLYSFHHSNLGTLLALSGAELLRTLEMPSGLTVLGVIILTAIINIMITSATSKWAIMAPVLVPMLMAVGISPELTQAAFRVSDSAMNVSTPMFPFYPLILMYCQKYYKNAGIGTLCSMMLPFTIGLLIILTATLYVFWAFDIPIGFDSGYTWHPAQ

SEQ ID NO: 5205 - protein, 200 aa, Xenorhabdus sp.
VLTLIATFFWGSNFQVTKITLMNLPPWTASAERFAFAALFIFLFMTSRKKFNIGVLRKNWLTFILLGGIGVAGFNGALFVGLQYATPVNAALIMATTPVTTNILEAIINRRPPDIVRITGMILSLFGVILVVTNGQFMLGNTIHINTGELIIFSGSLGWAIYTIGIRTFVIESTPLETTGWTMFFGTMMGTSKNFSQPQN

SEQ ID NO: 5206 - protein, 74 aa, Xenorhabdus sp.
MIPPRSALKKDKQASEYHRRKIDELGDPLLVLDKYVDFSALADTLNRIVPRIISPKGGRPPFPTEVMVRIIILK

SEQ ID NO: 5207 - protein, 174 aa, Xenorhabdus sp.
VLEKLLSYLYLDDCVSNKELSLKIGLPIPLVSAFKKELIKLNFAENKGVFKLKLEGNQYIQNELNYKLVDSELYNSLSSEEECEKFKNDLAGLLAPIYDSRPRVNVLLDQAHATLDTSVRRVMLLLKNPIVFKQKILFLGDDDLTSVALMMAFKNLGHYDNKNIHVKDIIKSLC

SEQ ID NO: 5208 - protein, 218 aa, Xenorhabdus sp.
MRENWRKSVLFKDYGEHFYEAFSEELNLIKDRNNFLINLANSSKKVIYQQDDEHMLTATFSENQSWTSIDGIGNYDLTPGEIATKLHNLEGSISFSGAFLSTIPFAIKYGVVSDFFNLTIKNSKIIDFTCQSAEFSKDFDKYLSTSSSNSTIEEFGIGTNCGVEKLYGLNAGFEERHPGLHLGLGGGEVGSHHLDLIFQGGKLFFGNTIVLDNNKFII

SEQ ID NO: 5209 - protein, 44 aa, Xenorhabdus sp.
MLSDLMENNAIELNEWFEEETFEEAVEIMQQKAVVPVGTAMWPV

SEQ ID NO: 5210 - protein, 301 aa, Xenorhabdus sp.
MQSLIWDDIRVFLAVAQTGTISNAATLLGVGIATVSRKIERLEETFGMPLFFRHQTGYQLTEDGKGLLEKAEAVETAANSFLTEVDVRTKITGKVRLATTEMLASNLIIPNLSVLQKKYPDLALEIITDSRTVNLHRRDADLALRLVRPEQGHVTIRQIGILGFGLYASKQYCENYSSQISDEAYNHAHFIGWTDEYQQLPMYKWMEKTLNGRPLSIATTSLSAQVAAVKAGLGLAILPHFIADSADLICLSPELGLDQPLWIVIQADLAYSLKIRKVVDFLTEVVSQSLQQLSSQIIKVQ

SEQ ID NO: 5211 - protein, 227 aa, Xenorhabdus sp.
MNAIILAAGLGSRFKDLTINNHKALLPINGIPNIERTIQYLNMFGVYEIHIVTGHMSHLFSYLKDKYQCNLIHNLHYKDYNNIYSFSLAEEFFNDSIVVDADVVLLRNIFVSLEKSTYYVIERPKSLDKEWIPVLDGHGIIESMNVSNINEPSLLGISYWDGKTCDIIKKELPKFLDNNILEDSRFYWDNIPISLFGRINVGIHVVEKAHAAEMDTIENYKYICDKL

SEQ ID NO: 5212 - protein, 46 aa, Xenorhabdus sp.
MPPRIPRACRKQGCPKTTTDRSGYCPDHLHTGWQAHQQGKNRHARG

SEQ ID NO: 5213 - protein, 352 aa, Xenorhabdus sp.
MQILLANPRGFCAGVDRAISIVERALELYGAPIYVRHEVVHNRYVVDNLRARGAIFIEEISEVPDGAILIFSAHGVSQAIRTEARSRNLTMLFDATCPLVTKVHMEVARASRKGKEAILIGHAGHPEVEGTMGQYNNPEGGMYLVESPEDVWKLQVKDENNLCFMTQTTLSVDDTSDVIDALNTRFPNIIGPRKDDICYATTNRQEAVRDLATDADVVLVVGSKNSSNSNRLAELAQRMGKPAYLIDSAEDIKEEWVDNISAIGVTAGASAPDILVQQVIERLKTLGAKTVNAGGGFQYIPHITGAVRMQLIDNAAMDIEAVKVIGITGQWLKLGRRLLLINRQLIKLKQPA

SEQ ID NO: 5214 - protein, 180 aa, Xenorhabdus sp.
MDTLLQKAGGLTGFKHIKANYTHEQYLHEFSSEFVKILFDTNITPESIINPVVEFLKRVASSLRVLWRNDSQKFELVILSQCHESIDVDGKIVYYPKVKYYHVGVTSEQNEFKTACSDTKKIKFNFTYNSFTSGLDESSLKQDSERGKKFVNYLNRAQDIMYKQADNSLDEIINVNSKKL

SEQ ID NO: 5215 - protein, 113 aa, Xenorhabdus sp.
MLHSPDRIVGLITALVLLFSSHLIRDLGRTLRAGEVPTEAVIAVVAEQLDIDPAVFTFYAQREETRREHAREIISALGLRSVRVSDYRMLILAAAREAATTERGLPITRAVSR

SEQ ID NO: 5216 - protein, 28 aa, Xenorhabdus sp.
MQHPRRTVQTGKALPHKAQAAQKGYRAI

SEQ ID NO: 5217 - protein, 261 aa, Xenorhabdus sp.
FSQLHEEGKLILANSWDVMSTRLAEQSGAKAIATTSAGISWSLGYPDNQLADRKIVMKALGLITSSTNIPVTADIEDGLLAPDENMDDLVEDLYFVGCVGINIEDSNNGKSRSINDGAERIASVRTAANKIHYSLFINARIDSWIRGEDTNPEHLISRANTYLAAGADGIFIPGLTDLSVCRAISSRINGPLNIMAQAGGPSVKEFFAAGARRVSGGSFFAEQAYGSTLTSMEHFLRDGLLQNSEQSKLSYASLNALLNSK

SEQ ID NO: 5218 - protein, 44 aa, Xenorhabdus sp.
MDSPIGENISYHDAWQVTLKLPDTILHQVRQEFGSFGAINDPVT

SEQ ID NO: 5219 - protein, 325 aa, Xenorhabdus sp.
MGSPYAEKRLKLTQVDFNNALDFAKTAHNESVKGNLKYALACGNCVDFGIQIFDKTQHGRRQFPNYLQPNTGLYAYSYASNLICSGDSFQMKEMNKVLLTPDKWRNERLPSWAKPCTDAEVPTKYCGKSNDSWDVIKAVTTELGTCEAPVKKYVVQRLTICSPIVINLDGKGIQTTSIFDQSVKFDLLGTGQKVTTAWITPSSGFLVWNQDGVDEVNSVADLFGGIDRMEGFLKLMDLDKTHKGYISQENEIYPSLRVWVDKSMNGRLESGELFTLPELGIEKLFVNFDIVDITDDNENLIGERSHAVINGIEHEMSEVYFKYNY

SEQ ID NO: 5220 - protein, 158 aa, Xenorhabdus sp.
VMSPLKAGDKAPQFSLPDQDGENINLSDFKGQRVLVYFYPKAMTPGCTVQACGLRDTMDELEKINVAVLGISTDAPEKLSRFIEKEMLNFTLLSDVNHQIAEQFGVWGRKQFMGKVYDGIHRISFLIDPAGNIEHVFDKFKTSDHHQVVLDYLQQHSS

SEQ ID NO: 5221 - protein, 138 aa, Xenorhabdus sp.
VLRSELARVAQEVPVKPFTIEEIAEYAGKAYDYHREHPELSRLMRWEGLVFDGEVPDEEQRRKYYNSKVQAVADGQQQGSITQTLAPDHLAFLILSLAGWWSAVPQVARMLTGSDSQQEHARRRASVVAAARRLASAP

SEQ ID NO: 5222 - protein, 227 aa, Xenorhabdus sp.
MNIIFFSPASDADKWVQGITERLPDAKVRKWAKGDNAPADYALVWHPPYEMLTERSDLKGIFSLGAGVDSILQQELENPGALPANVPLIRLEDTGMGYQMQEYAVSAVLHYFRRMDEYKRNQEQRIWQPLSPHDRKEFVIGVLGAGVLGRCVIEKLAEFNFTVRCWSRTPKELTGVENFYGEEQLGEFLSDCKVLINLLPSTSETRGVLNLSAFSQLKEGSYIINFR

SEQ ID NO: 5223 - protein, 383 aa, Xenorhabdus sp.
VVMLLAVIALFVLTQLYLAIPLLVPVSQNFNLVDSGEVTFALATSFSLAYAIGFLIWGPISDQYGRRVVMLWGLMAISVATLACSFAPSLSWLTSLRVIQGLAASSFAPIALAYLAETVPERYRATAIGTMSTSFLVAGIFGQVLAAWIDLRWNWNGVFLVTGAFLMVMIPLFIKVVKEPKRIVTEGHLGHRFIALGRIIVRPAGLLLSCAHITLLLSFVAMYIALGTHLWELGLMPDKVILLCLIGLPGMFAALLVGVLARRISMPAIAIIGYITAAVGLSLEAILSQSLTGIAIGSLVFVIGIALAIPAMITQFGSLSAPNRGAGMALNGFILFIGASIGPLIAAEISHFGILLSVFVVMLLLGAICVAGSASLTAMLKRP

SEQ ID NO: 5224 - protein, 114 aa, Xenorhabdus sp.
CSKGALSVYGYTTKRSLSGMGSFLFMGLIGIVLASLVNIWLKSPALMWAITYIGVLVFAGLTAYDTQKLKEMGAELDVNDKENMRRYSITGALTLYLDFINLFLMLLRILGDRR

SEQ ID NO: 5225 - protein, 72 aa, Xenorhabdus sp.
MNIVCIGGGPAGLYFGLLMKLQNPDNRVVVIERNRPYDTFGWGVVFSDATLENLSMADPVSAKSISAAFSRL

SEQ ID NO: 5226 - protein, 112 aa, Xenorhabdus sp.
VMFNNLLEDWFDELTPEGYAAYIAKHRFGLPTVHLEAEFKAISRMGDKVWLELNVEEIGKKSLKLRQRCFSQEGELRMSAIQTYVTTSLDTHQAIPIPDEFYYPLINQPLII

SEQ ID NO: 5227 - protein, 522 aa, Xenorhabdus sp.
VLADWIVSLAEAHGYFAQATSVPGVAQRTGATIYYVELFPGSDDPDAPAPVLALMPTAGDVDIVLASELMEAGRAVQRGFVTPDRTTLIASTHRAFTMQEKSAMGDGRVDSRRLIRQSQQAARCFIHFDMAQMAEKCGSVMSSVLFGALCGTGLLPFSSIQFEQAIIRGGVGIKPSLQAFGLGLSRAQATLSGGQPAGCNHPSGRSDSAHKNDARHDIFVKHNGSTNNHSANNKPINNHDVNALSLRIEENLPSCIHKMALKAVRRLVDYQDTEYASLYLDRLQHLVSQAGESNQQLLREAARHLALWMTYEDIIRVADLKTRASRFKRVHQEVRANRYQLVEINEFLHPRAEEICDTLPAGFGRWLSRPHTINRILIKLFSRGYVIKTSSIWGYFLLYMLAGLRRIRRRTLRFQRETAGIDNWLRRIVAAAKHDPALAVEVVKCQQLLKGYGDTHSRGLKNFQTLMNFVDCHRKKLSAHNLRQLREAALADEDGRQLHEYQQHLETNILKKNGGGVSNEPA

SEQ ID NO: 5228 - protein, 563 aa, Xenorhabdus sp.
VKMGFELSEASHTPVMLQMRIRACHVHGRFVCADNQLPIFRVENALENPIRDLNRIVLPPASFLHEKKKTQERWPAAVHFIQQNALNEFFAEGADDIGIALQGGCYNTVIRALNLLGLADVFGESRIPLYVMNVAYPLIDEEFARFCHGKRAILVLEEGQPNFVEQNVASILHQHDISVRLHGKDLLPMEGEYDTATVLAGIRAFLERYDRIEAKVPAVACQVQIPSVTLPDGETEGADARHEISDNAVHARPPGFCTGCPERPIFTAMKLLERELGQHHISADIGCHLFAILPPFNLGNTTMGYGLGTASASALSASASDKRAISVMGDGGFWHNGLTSGIANSVFNRSDNLTVIVDNSYTSATGGQDIPSSAAFNSSRSTGHGIEKAVKGVGVKWVRTIRRTYDLKRMIKTLREALTTKEQGPKVVVAQSECMLNKQRRIKKENKEMLAAGRRVVHERFGVDPDTCTGDHSCIRLSGCPSLSIKSNPDPLRTDPVVTVLNSCVGCGLCGEISHAAVLCPSFFRARIVTNPSRWDLLLYRIRKGFIHYLQRRDIRRREQDKF

SEQ ID NO: 5229 - protein, 139 aa, Xenorhabdus sp.
MSVVVGVGVIIINDKGEILLGKRTGKYAPYWSIFGGHVDPGETFEECAIREIQEEIGLKIQNPQVYGICNNIQTYREEGKHTISVCLIAHHPGGEPRLMEPEKCNQLIWCDPNNLPEPHFEASRNAIKLWQEKKFYLPA

SEQ ID NO: 5230 - protein, 252 aa, Xenorhabdus sp.
TIEVTQNFKRPSILGGAMIIAGTAVGAGMFSIPIVTSGVWFTGSIILLVYTWVCIYFSSLMILEANMNYPCGASFHTITKDLLGKGWNVLTGLSITFVLYILTYAYISAGGSIIFRNLNSIIPLPQAGTGLIFSFIVAFIVWLSTKAVDRLSTILIGGMVITFIMSVGGMFTEVKPAILTDQTNTETSYLPYALMALPYLLTSFGYHGNVPGLVKYYNKDVKAITRSMLYGSLIALTIYILWAVCHSGKYSP

SEQ ID NO: 5231 - protein, 123 aa, Xenorhabdus sp.
MALSSSFLGVSLGLFDYLADFFGFDDSHTGRLKTAVITFIPPTVLALLFPNGFLYAIGFAGLAATIWAVIVPALMARASRRRHPQASYRAPGGNILIVFIILFGLINAVVHILSLFDLLPAYR

SEQ ID NO: 5232 - protein, 191 aa, Xenorhabdus sp.
SMAKANEIKRGTAINHNGKLLLVKDIDIQSPSARGASTLYKMRFTDIRTGQKVEERFKGDDILETITLTRRSVSFSYIDGDEYIFMDNEDFTPYHFKKEQIEEELLFIPEEGLPGMQVMTMEGQLLALELPQTVDMVIEETAPGIKGASASARTKPAKMSTGLSIQVPEYLSSGEKIRIHIAERRYMGRCD

SEQ ID NO: 5233 - protein, 226 aa, Xenorhabdus sp.
ILILNMLGFALFFSWYLPENHGFWFHIDSAIFHYFNEKLLPNSKFALFVAIVNIRAFDVISLLCMGLLYYSAFRKQNYAGKRRLFMIGLVMLITAVIINQIGHQIPVSRPSPTLTFENVNRVSEMTSWHTKDASGDSFPGDHGLMLLIFSCFILRYISRGAFFIALLIMIAFALPRIMAGAHWFTDIAVGSLSLTLVGVSWALLTPLSDTLADWLDKKLPHIGRTR

SEQ ID NO: 5234 - protein, 196 aa, Xenorhabdus sp.
MSRRVATITLNPAYDLVGLCPDIVKGTVNRVRTAGLHAAGKGNNVAKVLRDLGIDVTVSGFLGKENQDGFQHFFDENKMINRFHLVSGRTRINVKLTEKYGDVTDFNFSGFHVTEKEWEQFVTDSLSWLGQFDMVVVSGSLPEGVSPESFTDWMKQLQQCCPCIIFDSSREAFAAGLKATPWLVKPNRYELEIWSG

SEQ ID NO: 5235 - protein, 1069 aa, Xenorhabdus sp.
FHSNTIDRFIANYEALLAGIVEVMADVSANKEPSVHELPILSDTEKQTLLHQLNGRQKHVQQGCCFHELFEEQVAKTPEKTALVFGDDTLSYQVVNAQANQLAHYLIEQGIQPDVLVAICLPRSLQTVITLLGILKAGGAYVPLDTSYPQARLQYMLEHSEAEFILTDTSLVDKLPINQQRVICLDTETVRSYVRNLPTANITHRPFPLTENHLAYVIYTSGSTGRPKGAMLEHKGWVNLAQAQAELFDANADIRALQFASWSFDAAVLEMAMTLAYGATLYLISETHRRSPEWLDEIVERHRITHAVLPPALLPHLDFNKWRTVSTLLLAGEAVAPHIVEEWSRGRKLFNVYGPTECTSIVTSALLTVDKRITIGKPLPNTVMRILNSDSNLVPFGAVGELHIGGIQLARGYRNAPDLTEKQFIHDPFSTNPADRLYRTGDLVRWTPEGELEFIGRLDSQIKIRSHRIELGEIEAVLAGQEILSNAAVIVNGHDSEDKKLIAYVCPSTNWLAEKATEFNVDYLESWTEIFDNQYRQELAENTTTDTIDKCDDDSDFSGWVNSYTEQPIALEQMEEWRAGTMQRINSLQSRRLLEIGCGSGLLLYRYAEQCESVLATDISAEVLARHQNILQKRGWSHVELRRGDALNLGVITPDQFDSVVINSVVQYFPNVQYLEKVITQLLPAVENGGKILLGDIRNLDLLTAHITAIERDRLNDQHISVGTLANYIQRRLQQENEFLISPTYFAQLPTRYPEIGRVDILVKRGVGDNQMLRYHYDVILYKCDKNTELCCDPTRIWKDFNSLEDLRNTLEVGEFDTFGVSGIPNARIKDDFDLAEGLRHWSSDQIIFPPKNAGSFSPEIAEQVSALESLLQYAEQCGYQCELTWSQQQPDLLDVIFSRSDLPQIQARSDYNQTHLANYPQLPAIGGELTELLESALKKQLPDYMIPSLYIPLERIPLNFNNKVDKKALPIPDESDLHRQVYIAPRDEIEEKLSQLWQEHLKINQVGIYDHFFSLGGHSLLAVKIVASIKNTLDKNFTMHQLFANPTIAQIASLIRHSNRHEMSSLEH

SEQ ID NO: 5236 - protein, 120 aa, Xenorhabdus sp.
VALEKNIASIERLNALLPNLDHLAKQSLAASIINPTVGFEAIPLPVLEEKYYTAGEVGKMLDVSAKKIGLVANKHNLKNEKNGKFFLDKSAYSSKQVEAFRYNENGIKALRHLIHGVEVA

SEQ ID NO: 5237 - protein, 107 aa, Xenorhabdus sp.
MDARIEKLETRVDSIESTLSRLNETMLKLDGKIDLQTSKLESAIALQSNKLESAIALQGVELKSSMDKQKVAFDGKLKDMRLSIILWILGLPSLFFAVYKIYETIGH

SEQ ID NO: 5238 - protein, 227 aa, Xenorhabdus sp.
MDAGISLGGAALINTLFGNYWGIFNQYGIPLLLADSVISLQYQTQYRVVSAPIENGSFASYNKVGEPYKVTVQLSKSSGGTLERGAFLSQLEILAKSTLKFHVVTPEFVYINAAIVGYDLAREAKDGTTLIKVNVHLEEVREVKIKYDKEEVKNPDDAKKKDTGDQTQKVETQQKRVEKGDMSWGKYSMTEPESAFNAAMEKVTNATMERVKQIPLLNQWLLGGPVQ

SEQ ID NO: 5239 - protein, 72 aa, Xenorhabdus sp.
VAVNAKNTNAATQGAVGNLKGVIDCYVIDNPSNETKTVGFTNYPLIRNSIAVSVVGGDDNEIARHILSKAGS

SEQ ID NO: 5240 - protein, 78 aa, Xenorhabdus sp.
TLGKVQVRMPEEVEALEQQRRAEAERLASQQHLSHEVEQGALMSEAEAQMASGSRKVGRNDPCPCGSGKKYKHCHGRL

SEQ ID NO: 5241 - protein, 34 aa, Xenorhabdus sp.
MGTSMTMALSNSGNKVAVLAHIGYCSWKFILVMR

SEQ ID NO: 5242 - protein, 323 aa, Xenorhabdus sp.
GNFMRVQKPINSGFSSSSTASDVLKGIDIKGKTAFITGGHSGLGYEATKALSEAGAHVVVGARDILNASNALSKLSNITVLPLDLSDINSVRKLANYIYANRCLFDYVICNAGIMASPEKRVGPGWESQFATNHVGHYVLVNLIWNNIRVGGRVVCVSSAGHHNSPIRWDDIQFTSGYDKWVAYAQSKTANILFALQLDEYGKDKNIRAFSLHPGKIFTPLQRHLSYEEMESEGWMDKDGNPIDPTFKTPAQGAATEVWAATSSALNGLGGLYCEDCDVAGLASDYKEPFAGVCEYAIDLSEALKLWNFTANLTGVNTFVTKE

SEQ ID NO: 5243 - protein, 233 aa, Xenorhabdus sp.
GCQNLDHGMLASSGMQLFKAATLNDSDVKQLSDQSCRDMDAQNKIAPASSQYTKRLDKIAKALGHEINGTPVNYKVYLTDDVNAWAMANGCVRVYSGLMNMMNDNEVEGVLGHEMGHVALGHSRKAMQVAYAAVAARTAAASAGGVAAQLSDSQLADLGQKLLNSQFSQHQESQADDFSYELLKKRNIKTEGLATSFEKLAKLGSGETSMFDSHPPSKERAEHVRNRIAADKK

SEQ ID NO: 5244 - protein, 34 aa, Xenorhabdus sp.
VIFYLEDFTRHQFDAVTAAATGLFLVVQCFLPVF

SEQ ID NO: 5245 - protein, 435 aa, Xenorhabdus sp.
MKSGLRFVCTIAGVPADTFAVGEFSLQEGLSELFTLNMTLVRAGNANPFRPQTDIDLASLLMQEAVLQVFNGDRLQRKITGIVSHADWVGTDGNKTLYTLTVRPACWRLTLNQDSRIYHRQNVPAILNSLLKKHRVQADSKLYDAHQDREYVTQKRESDYAFFSRLAAEEGISFWFEDETAFFSDSHLGMTAGLPLQYQPQPETAYGTDTIYQVRLGVGMSPQRSLHKDFNPAEPRYHLSHMHSSEGFRDFGSQTPYTVFESYGRFQKDAAAIPFLKYRQEALDNQKQTGSGSSNCIKLMPGKIFEIKNHPHKPLNVRWQVVGISHHGRCPQALGDSGGEGTTLSNHFSFIDGLADWRPPFHYKPLADGDETAIVVGPKGEEIFVNKDGAIKVHFHWNRYDPPDDGASCWVRVAQGWNGNGFGFMAIPRIGQEGL

SEQ ID NO: 5246 - protein, 585 aa, Xenorhabdus sp.
MNNNKESLYLRERAYLRELAQRVAKDSPHLADFLIASHDPDITRLFEAFALLIASVRAKLEDELPEITHGILSRIWPLALCPLPPTTILQFSPADGEHQGCTDIPVDTAVSAHHNGQLMTFKTRRPLHIEPLVVQQRTVKKTGTHSEIMLTLCQTGTVSPVWQSGALTFFLGTDTEKAAQLSLWLDQHIYEVSLNTQGKQRKLRGFPYGWHDLLDSPVLPVPKNTYSGLQPLVEYYALSPLYNFITLDISKSCTKVPLNADGTFELIFRFEGELPLDNVDEAFLLGCVPAIHLENRVSLPIALEAGNHRYPLPLGESVKLFRLGDIEVVEQPGDSEQRGTPYHWLPIEQFTPAGHFRDENEQPDTFYYQLQTEPDFLGRTQHRLHFFDLTGKPANDLPAIAVLCSFTGYHEQAPALKQGTITVTQEGAPSHLSVHNITPVMTDYPPLLQENSGWPLLSCLSSPPMMLFATDSLKQFLRLFDPYANTHRPLSRQFRQHIDGIVQAEERLTDRMRLGRSVRGHLLALTLNSDCYRNPGEMYRFCRLINQALACFITQSAFVMLEIFTPDSHKVLWQFWHVDGLRPEM

SEQ ID NO: 5247 - protein, 79 aa, Xenorhabdus sp.
IQRKAARNKPLSHCQKGRNKKIAKTRARVEHIFGSLSQMGEKIIRTIGQLRANFAMTMKATCYDLQRLVYFGKSGIHAF

SEQ ID NO: 5248 - protein, 61 aa, Xenorhabdus sp.
MVFEGVPEEILEKFARISPIAWQHLFFTGRYSFKKASKTSIDVAALAELLEQHLKQAFWKS

SEQ ID NO: 5249 - protein, 166 aa, Xenorhabdus sp.
VVHHSGKDESKGARGSSALRAALDVEYKINREGKKGGSLVITCTKMKDAEEPDTKAYDMRVVELFTDKDGEDITSLVLIDRPRDPVEEEEISHVSNKTDNHTALWQCIRSRTALKEPCSIALVRDDLKSMGVNVKNFSRWLTKLEQDGMITRHGQELTIVNQNNED

SEQ ID NO: 5250 - protein, 173 aa, Xenorhabdus sp.
TILISGGAGGLGQIFAKYLANTFDANVVIMGRRKSSELPADYKTVEKGTIEYIQADCCDRQALTAAIEHIITQYKNIDLVIHSAGSIDDRSMFLKTEQHVRNIVESKVIGCELLDELTASLPVKQFIVFSSITALFGNPGQTDYAAANHYLTAFAHNRNKKQSAGSLEHMARA

SEQ ID NO: 5251 - protein, 184 aa, Xenorhabdus sp.
LNRMCHSQKDLTAHIENDAYWHIKHDQKSRIDNNRYHDIRADDHHQVAGSRKITTEGDVSHRIAGSQHIQTGDATVIDSGQEIHLKSGGKVVLEAAAEITLKVGGSFLKVTPAGILSSMINVGQGSGGSGRGVSLQLPEGVAPLGQVGQLPMAEALPVTEFPVQPACAELAQQDASLVIKPVKE

SEQ ID NO: 5252 - protein, 264 aa, Xenorhabdus sp.
MERAITMENTESAISWQAWLNEPNKAPVFFILNSLAKPNPIEPFYRHDWVEQAFPLYSGTPMRNMLKQSPWLVQPKANQLVQIGAVLDNHALSDNSWGWAYRSQTPWQEQLNHWQQRQWVMMNGEPVLFRMMDARILGALMPAFTPSDWSLMLSPVTELMIDSPQLMRFCRPDACNEGNSEIPFTLGEHLLAVWLRSPYGLKVLTSSLYNDLWENHGAMAKQWDQPEGSLEPRIEQWLRQKLETGQRIEKVSSQDYLLAMEQEK

SEQ ID NO: 5253 - protein, 623 aa, Xenorhabdus sp.
VDEHNKPIPKMDYILKNSKVERPGTTDENGMIREEKLPASPIRLFLGGQKLADEMEKRPLRTLRGESNSTVKPDAESKGYFYRYAVIGELCDKAPNIAEWEQTRFGLPYYHFPKEDEFKGLEFYGEDFNQRHVIEVCPFRAWSLILKHTPNYDIVNAYNLGLMSILVYKDEVMVNPDSPDINMRKFINIPDTTTSFFYQQCFDLSKIPVINDGYVYPAIVNDVPFKERYRPAIFLDVKQVKEVETFEHDTQMFFVENDTQIIAAWRGTASSRDALTDGTYRPIPCPENILPGKKAKVHKGFLDAYQCMEKYFKDRITSIKDKSDFGIKELFICGHSLGGALALLHATELRDNNPLLYTYGMPRVLTGSGVKELTSLNHFRHVNDADMVTSVPFDTNMDNWLFDVFGPLGPIFGFSWTMATLPTIPIQKHLPDIGEVYYHHGNTVSFFLARQMGEERIPSKNGIGYVGKKAWRMNGSYKFYLVPSIANSLDKELENKQQEYMNSLKGDKFVIDEIFPQWNNPNLDTMITIATDHFMTTKYQAIINNQLLSFFEPTKTPKRIESKGKFNELIHHQEASPLKAKRNTIFMALENKLYDNFKQDVNQDELLKHALERYKENTHEISI

SEQ ID NO: 5254 - protein, 221 aa, Xenorhabdus sp.
MATIPDELDALPISAMYRSEICRKEQLTANMESYTIPGFHHATYPLSIGQSNQVEVSVPKEGGGKCDWKLSNITFEVKLKDTSTIAPLIDDNFGFKTTFVIDGNAPAVFDGGYLKKTGDLNEEITLFPLLRERFSGKHSKSFYLVGKYDVMTYKMYNSRKINLNVLYEKNFLTHWQGRKNKNSDTSMTYPDGTIIYNGDVIPEFDKLMRILESRSNKQTKM

SEQ ID NO: 5255 - protein, 89 aa, Xenorhabdus sp.
MPLAQAAEKDELASAKRLIDQVLIALERASIAEKQSDPSEHPRYHFDYSRIRADLHTLKAGIDRYLSPSRDQPRVPVPLSGDYRQEHPQ

SEQ ID NO: 5256 - protein, 78 aa, Xenorhabdus sp.
MTSTQRQAFEVASGHFDIYFLSLVCVGFFLATLFLWAAWAAVEVWNGWANEKVRNQTLRQFALRTAVLLVVAVWMFAS

SEQ ID NO: 5257 - protein, 74 aa, Xenorhabdus sp.
MGQVKGYAQDGIVIGGLILSAVAFFKVASAAVETFSEVRDGKATWTQFGSIIVVGIVLLVAVIWLLAKSANIIF

SEQ ID NO: 5258 - protein, 99 aa, Xenorhabdus sp.
MGLAAIAGLALGLGGSLPFIPFAGWVMLPTGMLMMPLLLLSVGGRWLATLKRGKPENYLWQKLAEKKRRLGLGDPTLIIAAQGWSLRRSRQAHRNRRGV

SEQ ID NO: 5259 - protein, 182 aa, Xenorhabdus sp.
MASPRNLTIHNPPDLRSGSTRAWWEVPAPSVYSFAFYIFQQLHAWPKNGAQDYPAKIEALSPYLTPACQDFLRVDARTRADSGELLDRVRVVYEVPGRGYETRSVTVRDRDNWVVRLDLVADEYYHAEPVKRALVRYPLKVVRWEGDAERNPFGLALDCYDGMPQRLEALPPPAEEKKGVFQ

SEQ ID NO: 5260 - protein, 162 aa, Xenorhabdus sp.
  unsure (1)..(162): unsure at all Xaa locations
MRRDVFDWRGVGLGLVSFLLFCAGAKADELLTWERIPLSITLQVGQERIIFADRNVRVGFPPLLNDKLRVQSTGGAVYLKANSAFPSTRLQLQDSENGEIILLDVTAGKTGASEPVRIIYPVEKSTDSKDKPHSQSKPSLSAPTPVLLTRYAXPATLEHMVR

SEQ ID NO: 5261 - protein, 104 aa, Xenorhabdus sp.
VLLVVAIVGNYYYREYNLPLRAIAVVAIVALAGAVALLTAKGKAALAFARESRVEMRKVIWPTRQEALHTTLIVAAVTAVMSLILWGLDGILVRLVSFITGLRF

SEQ ID NO: 5262 - protein, 89 aa, Xenorhabdus sp.
MEQYRQDKSTMLLALIVGLATHGTFSAFFNSAVPFSIFPIITLALSLYCFHQRYLNYPMAEGLPKLAFGCFFLRLFAYNAIIRVNHPEL

SEQ ID NO: 5263 - protein, 366 aa, Xenorhabdus sp.
MQNLLPTEDYENQLMEKVHRLKEMMVSFSAPEPEVFRSPASHYRMRAEFRIWHEEDDLYHIMFDQQTKQRIRIDQFPVACQLINSMMQAIIAGVKNNSVLRHKLFQADYLATRSNKIIVSLLYHKKLGDEWREQATALRAQLKAEGFDVQLIGRASKTKIMLDHDYIDEELPVAGKTMTYRQVENSFTQPNASINIHMLEWAINSTKDAKGDLLELYCGNGNFSLALAQNFVRVLATEIAKPSVAAAQFNIEANQIDNVQIIRMSAEEFTQAMNGEREFNRLQGIDLKSYQCETIFVDPPRSGLDEETVKMVQGYPRILYISCNPETLCQNLETLSQTHKVSKLALFDQFPYTHHMECGVLLEKID

SEQ ID NO: 5264 - protein, 236 aa, Xenorhabdus sp.
PKISVIMSVFNGCEFLSEAVESILSQSFYDYEFIIVNDASTDNTDQVLFEFQKRDSRIKIITNAYNIGLAKSLNMAISLSRGEYIARMDADDYSFPDRLKKQYDFMVEHTDIIVCGTSMSIHEELGNNKIPPLSHEEIISCIAFDCPFYHPTVMIRKETFLKLGASYPENYKKAQDYGLWVSLFLLTIGEGYRFINLPDILLKYRVHPEKVRDDYYNEKLLYSAESQFKLMPYLGI

SEQ ID NO: 5265 - protein, 159 aa, Xenorhabdus sp.
EKMKKYLLALAAMSVSVYAQADKTDDLAPFPEPSEGMVRSVITLAPEKDENNYMVELMIGKSMMVDCNHHWFGGNLETKNIDGWGYNYYELDKVAGPMSTKMACADQKKTMKFVTVNLDKDAFVRYNSKLPIVVYTPKTIKVKYRIWQTSDKINASVEK

SEQ ID NO: 5266 - protein, 231 aa, Xenorhabdus sp.
MFKKLSAELLGTFWLVFGGCGSAVLAAAFPILGIGFVGVSLAFGLTVVTMAYAVGHISGGHFNPAVTLGLFVGGRIPAKDVIPYIIVQVIGGIAAAAVLYLIASGQSDFDATESGFASNGYGEHSPGGFSLQSAIIIELVLSAFFLIVIFGVTDKNASIKFAPLAIGLALTLIHLISIPVTNTSVNPARSTGVAIFQGTWAIDQLWLFWLTPLIGGIIGGLIYRWLLQKNE

SEQ ID NO: 5267 - protein, 75 aa, Xenorhabdus sp.
MFPEFAEDRDLVSNLKDSHPRFQSLFEKHNRLDHEISQLEGPNGAGYNEKVVRLKKEKLHIKDEMQRILQAESQK

SEQ ID NO: 5268 - protein, 225 aa, Xenorhabdus sp.
VKNSAISSATLSWNEQGTPISEQFDDVYFSNQDGLEETVYVFLKGNHFPQRFSTHPRSDCVIAETGFGTGLNFLAIWRAFSAFRQQSPDATLKRLHYISFEKYPLKIADLKNAHQRWPELQPFSEELCQQWPLPLSGCHRLILDNGAITLDLWFGDVNELLPKITSGLNSKIDAWFLDGFAPSKNPQMWSRTTVHFNGKIFSSGRDICDFYFRRFSSPWITGSRL

SEQ ID NO: 5269 - protein, 297 aa, Xenorhabdus sp.
MDRQQLSQISGLDVNYHGVHYPQGGWLYPGKLTQEAIKLAQQRGMCTHFNHKIIRLAQYENGWQLHIEHQGQVQLKTHKAVVIANGHCLPQFEQTEKLPVTAVRGQVSHIPTTERLSQLKSVLCYDGYMTPVNPHNQYHCIGASYQRNFLDIEYSSAEQQENRDRLLKCFPDVEWVKEVDISENKSRQGIRCVIRDHMPMVGNVPVLKEIMEKYANLPQQMQSGEKIDESPCYPDLFVIGALGSRGLCSAPLSAELLAGQIFGEALPLDDETLAALNPNRFWVRKLLRGKKVKTEKP

SEQ ID NO: 5270 - protein, 74 aa, Xenorhabdus sp.
METVIQVAEQRQLQSLTLTTFRNILWNAPFYQKLGFVILEPQEMGEELQQILQSEIEYGFSAEQRCAMKRPMII

SEQ ID NO: 5271 - protein, 91 aa, Xenorhabdus sp.
MLAEFETRILAQIDDMVEYASDDELFAGGYLRGHLTLAVAELELEGANTIEQLHQRVEESVQKAIKAGELTPPDQVLILSTWKKLLDSARA

SEQ ID NO: 5272 - protein, 174 aa, Xenorhabdus sp.
IEIFDNCFSDGYNTRLIKGDDEPIYLPADDKEVYNRVVFAHGFYASGLHEISHWCIAGAERRKLVDFGYWYCPDGRDAQTQAEFEKVEIKPQALEWLFCMAAGFPFNISCDNLDGDFEPDRFAFQQKVHAQVITYLENGIPLRAARFIRALQSFYNTPPLKAEYFPDPENPFAH

SEQ ID NO: 5273 - protein, 249 aa, Xenorhabdus sp.
VAELVAAGIPKVEAVAMVKANAPERKSHKPHNSHAKPVNLEALSTHYIVVGDYELLSLKHQDALIAAIRNGKGKSSWNDESMAITLFGLVRAYPIITTAEVNKFLNRGAFIDSIPLFIDGEVIEGEVMPSANNESVKDIFRAVKQLKKITDSLMGSGALHLQKYLDRVPTDEDVKRAVGIVAPAIINPHFHEIDYERQYNEMPVDAHAEDSKRIINEWKRELRIKGSKKPNSETLASTADPVLAERNHE

SEQ ID NO: 5274 - protein, 416 aa, Xenorhabdus sp.
MLNITPNFAQERGLSLLRQNWKRHRTFMVYSPTGSGKTGLAAFITDGYVTREMRVMFCVPYTILVEQTATRFIEYGLPGDEISYVWRDHPNYDPTRLIQIASADTIIRREFPDNIDLLIIDEAHLRRKRMLEIIRDSDIPVIGLSGTPFAPFLGHYYEKLIKPTTMKELIQRGDLSRYEFYAPMKPDLSGVKSNSSAEFGSDYKEAEIAEIMCGADLVGDIVSNWLANGNNQPTICFCVTVSHANFVTVEFTRAGVNAEIITAQTPHEERQIIIHRFEQGATKVIVNVGTLIAGFDSDVRCIIYARPTKSEIRWTQCLGRGLRTAPGKEACLIFDHSGSVHRLGYPDDIEYDELPSKNDGMKTSSSHREQEKREKLPKECPSCHYMKPAGVYVCPKCDFKPLTGEDIDVDTSRSIQ

SEQ ID NO: 5275 - protein, 376 aa, Xenorhabdus sp.
LSPSTLVTGFVAVLVGYASSVAIILQAVTTIGVEPSQIGAWLGMLGVGMGITTIGLSLYYRTPILTAWSTPGIALLATHFPHTSVNEAIGIFVFASALMLICGITGLFAKLMNYIPHSIAAAMLAGILLRFGLDAFSVLQSNFWLCGIMLLIYVIFRRYFPLYAIISTLTAGLIICIFNGDLNLTGKDILFSMPEFVMPKFNITTLIGVGIPFFIVTMASQNAPGIAILQAGGYPPRTSQLLIWTSLATIILAPFGGFSICIAAITAAICMGDDVHPDPDKRYVAAISAGFVYLLAGIFGGVIFYLFSGFPTSLIKILAGLALLSTFTNSLSQAIKDESARDAAIICFLITASGANLLGISSAFWGLVGGIITHLI

SEQ ID NO: 5276 - protein, 185 aa, Xenorhabdus sp.
MSDITSKIAETFKSLRASRGVSLSQAAKLTDVSKAMLGQIERGQSSPTVSTLWKIATGFNVAFSTFLEGTTPQTVLHRFNNLPSFEQNNSGMSVKPLIPFDDEFFIDLFKIELAPGASSESTPHESGVVEHVIVLNGELDLRINDEWHKVSSGESMRFSADCSHAYANSGDEVVVIHNLIHYPHK

SEQ ID NO: 5277 - protein, 230 aa, Xenorhabdus sp.
INQYSTMHALMSGVFDGMFAIAEISQGGSFGIGCSHALAGEMIALDDTFFEIQGAGNVRRFSEYDQLPFAQLTYFNPSEQFPVSDISKKDLYSELSAQVNINNIFAAVKIEGIFKKVWLRRTNYQKKPYKTFIEAIVEQSEETLHNVSGVLVGFWSPDIFHGISVAGFHIHFIDDERKNGGHVFDFELQSGLLSYEPKQNIKIHLPDNSEYINADLTVNDLDEAIRKAEG

SEQ ID NO: 5278 - protein, 64 aa, Xenorhabdus sp.
MVRIIILKHFHNLSDEKMEYQLLDRMSWQRFCRLTDVINIPDRNTIWCFEKRIGQEGARALSLE

SEQ ID NO: 5279 - protein, 132 aa, Xenorhabdus sp.
VMLCSGCATIVGEKTQLVQINSQPSGAEFSIKDETGQEITRGNTPQSVMLAKSTGHYFGGKTYQITFTKENFQSVTLPLIAKANGWYIGGNFVFGGLIGWLVVDPFNGGMYTLHPKAANVTLPASNTLSDAK

SEQ ID NO: 5280 - protein, 109 aa, Xenorhabdus sp.
GIKAISTSGHTPGHTSYLLNSGKNNMLILGDMIHFYAVQLEHPEVSIEFDIDNNKAIEARKSIFKKASDEKWLIGAAHLPFPGIGHLRQNQQKYDWVPVEYTTTLKVNN

SEQ ID NO: 5281 - protein, 359 aa, Xenorhabdus sp.
MASVINTNYSSLLAQNNLTKSQGTLGSAIERLSSGLRINSAKDDAAGQAIANRFTANVKGLTQASRNANDGISIAQTTEGALNEINNNLQRVRELAVQAQNGSNSKSDIDSINEEITQRFDEINRISEQTQFNGVRVLREDTSMAVQVGANDGEVIKIDLKKIDRETLKLNNFELVGTKFGAEVTKGAFDPAKKDTTVAVDTASLKNLDTGKAPATDIKNAKLYEAAKKADGTDGGYVIRGEDKDGNTVMFQATVDKDGKVSKGAVVDIKKPLKDLDNALSTVDSLRSSLGAVQNRLESTVNNLNNTVNNLSAARSRIEDADYAVEVSNMSRGQILQQAGTSVLAQANQVPQTVLSLLR

SEQ ID NO: 5282 - protein, 103 aa, Xenorhabdus sp.
MENKDINGNNQTPGWGLDALKFLFEERKIKAIGHETFDTDSSKEARNNNIFLGEYYVLAQDTYQIEIMKNLDKVPTRGAIIFNIVAKPEKATGFPVRSFAIIP

SEQ ID NO: 5283 - protein, 119 aa, Xenorhabdus sp.
LLSAYQQILSLSEQMLDLAKNEKWDVLVDMEITYLKAVEVVTLISEDSDAPISLQQKLTKILQTVLDNENETKRLLQKRLDELSDLIKQESCKQLLHDTYGQFPVSDYEMELTPTTEKT

SEQ ID NO: 5284 - protein, 136 aa, Xenorhabdus sp.
MYQRSASQLYAQVDLESEIMNASPYQLIQILFNGALSALRRAIILMQQGNIPEKGLAISKAINIIDNGLKEGLDFEKGGEIAQNLSALYDYMSRRLLHANLRNDEKAITEVIDLLTEISDSWRQIGPHYNASQDIV

SEQ ID NO: 5285 - protein, 487 aa, Xenorhabdus sp.
MASISSLGAGSGMDLGSLLDKLQAAERKRLEPLAQQQTSYKAKLTGFGTLKGSLEKLQTASEELKKFDKLNTTKTSEDHKLFTPSTDSKASPGNYKIEVEQLAVAQSLQTVSVPSVKEQLGETSATSRTIVIEQEGKDGKTELMKIALTNEQTSLVEIRDAINKQEGNVNASIIKADDKNNYLILTAKKAGTKSMMKIKVEGDNKLNELLEYPPSGKNRAGVMQEKVPAKNAVLHVNGVKIERQTNEIKDAPEGITLNLKKVSEKETVKITGEKGEIKEVEQFKSETLVVSRDIEPMQEAIKKWVDAYNDLQSTFDSLTKFKAVGKGEAASKDNGALLGDGTLKNIQNQLRHQLFAAQNVADIATLNKLGIKQKLDGTLEINKDKLEKNLKEKPANVKAFFMGDGEKTGFATQTYNLLKKTLDSHEGTIATATEGINKSLKTLEKQVERTNDTIDATMERYKRQFTELDKLMNSLNNTSSSLFQLLR

SEQ ID NO: 5286 - protein, 68 aa, Xenorhabdus sp.
MTVTTLKISLNRLPEVQRRTGYSKAWIYKLISDGEFPKQVKIGPRSVAFIEAEIDNWIAQRIAESRAA

SEQ ID NO: 5287 - protein, 135 aa, Xenorhabdus sp.
MKDPLIFTEQKLLPRFIDVTLTILAWCGFVYLFISGLFNSPHHGPKPVMYIFSSELSSIAVYIIVAIFNAFLLIGWAKYNQIRFRIERRHHRPALNHDEIATSFSLEERIIGRLNQGKVSDITYDNHGHIIGIAE

SEQ ID NO: 5288 - protein, 264 aa, Xenorhabdus sp.
ALKLPRVLSYDKNSGELSVNKAQYRRLSPYNLENRRRIKEIYQDLAAHSIFQGVLYHDDAIMSDFEDAGPDAIRVYQREGFPASIAEIRQDPEQFARWSRFKSRYLTDFTQELTEAVKSVRGYQVKTARNIFALPILEPDSEEWFAQNLDDFLAHYDWVAPMAMPLMENIPLSKSNQWLSRLVKAVGQRPDALSKTVFELQAVDWRKPSDKRMISGEQLAEWMRQLHLNGAQNFGYYPDDFINNQPEMNSIRPVLSSEWYPLND

SEQ ID NO: 5289 - protein, 354 aa, Xenorhabdus sp.
VRETLQAALNQRYSNIEVIAINDGSTDSTAHELDDMAKQHSALRVIHLKQNQGKATALQAGAAAANSDYLVCIDGDALLDRDAAVWMVKPMIDHPRVGAVTGNPRIRTRSTLVGRIQVGEFSSIIGLIKRTQRIYGQVFTVSGVVAAFNRRALADVGYWSNDMITEDIDVSWKLQLRHWSVFFEPRAICWILMPETLRGLWKQRLRWAQGGAEVFLKNLQKLWAWEYRRMWVLFAEFCCSVIWSFTFALSIILFFLGMLITLPETIRVYTLFPPGYTGLVLAATCLIQFTVSLLIERRYEKHVASSLFWVIWYPVVYWMLNLFTTLVSFPKVMLKVHRKRARWESPDRGIERIE

SEQ ID NO: 5290 - protein, 141 aa, Xenorhabdus sp.
VARVVSGIISYTYWPVTRPTLHLCLVPPSKYIRALKNINMFPDEIELRVEVLNFNTEQLVDKCDIIYYGQIDPILQHQVFNQKNNKPLLTIAEQNQHCEIGSAFCLNIDSTQTTFNLNLDILTRSGIRVDPNVLQLARKAE

SEQ ID NO: 5291 - protein, 133 aa, Xenorhabdus sp.
RPTLRQTVHRIHLIITVVTLSVVGLFLSLLALFAMQKYAENNLKQMSSTIAYTAQAAVVFNDKTAANKVLEMIAAHDSFTEAKIFDAKNQILASWHTNQITRTGNFKKLIEYWIFPEPTTFPIYHHQQQVGSV

SEQ ID NO: 5292 - protein, 753 aa, Xenorhabdus sp.
MVYSYTEKKRIRKDFGKRPQVLDVPYLLSIQLDSFQKFIEQDPEGQNGLEAAFRSVFPIQSYSGSSELQYVSYRLGEPVFDVQECQIRGVTYSAPLRVKLRLVIYEREAPEGTVKDIKEQEVYMGEIPLMTDNGTFVINGTERVIVSQLHRSPGVFFDSDKGKTHSSGKVLYNARIIPYRGSWLDFEFDPKDNLFVRIDRRRKLPASIILRAMDYTSEDILNLFFDKTTFEIRDNKLQMTLVPERLRGETASFDIEANGKLYVEKGRRITARHIRQLEKDQVDRIEVPVEYIAGKVVARDYIDQNTGEIICAANMELSLDLLARLSQSGHKTIETLFTNDLDHGAYISETLRIDPTNDRLSALVEIYRMMRPGEPPTREAAENLFENLFFSEDRYDLSAVGRMKFNRSLDREEIEGSGILSKADIIDVMKKLIDIRNGKGEVDDIDHLGNRRIRSVGEMAENQFRVGLVRVERAVKERLSLGDLDTLMPQDMINAKPISAAVKEFFGSSQLSQFMDQNNPLSEITHKRRISALGPGGLTRERAGFEVRDVHPTHYGRVCPIETPEGPNIGLINSLSVYARTNEYGFLETPYRLVRDGVVTDEIHYLSAIEEGNYVIAQANSALDEEGHFIEELVTCRHYDESSLFSRDQVQYMDVSTQQIVSVGASLIPFLEHDDANRALMGANMQRQAVPTLRADKPLVGTGMERAVAVDSGVTSVAKRGGVVQYVDASRIVIKVNEDEMYAGEAGIDIYTV

SEQ ID NO: 5293 - protein, 121 aa, Xenorhabdus sp.
MSITKEQILDAVAEMSVMDVVELISMMEEKFGVSAAAAVAVVGGAAEAVEEKTEFDVILTGVGANKVAVIKAVRGATGLGLKEAKDLVESAPAALKEGISKDDAEALKKSLEEAGASVEIK

SEQ ID NO: 5294 - protein, 165 aa, Xenorhabdus sp.
MALNLQHKQAIVAEVSEVAKGALSAVVADSRGVTVDKMTELRKAGREAGVYMRVVRNTLMRRAVEGTEYECLKEAFVGPTLIAFSNEHPGAAARLFKDFAKANPAFEIKAAAFEGEFIPGSDIDRLATLPTYEEAIARLMSTMKEAAAGKLVRTLAALRDQKEAA

SEQ ID NO: 5295 - protein, 89 aa, Xenorhabdus sp.
MTSLVLKDIRKSYGQVKVLHGIDLSIEQGEFIVFVGPSGCGKSTLLRMIAGLEEITGGEMFIDGQLVNEIPPSRRGIAMVFQSYALYPH

SEQ ID NO: 5296 - protein, 77 aa, Xenorhabdus sp.
MRIKRIGLEHHGDAPARGRDFIDELAINEHLAAGDFLQTGDHAQKRRFSAAGGADKNDEFALLDRKIDAVQDLHLPV

SEQ ID NO: 5297 - protein, 127 aa, Xenorhabdus sp.
AQAGFSTANKTWLPIPDEHKQRAVSAQQGNEASVLEHYRRFLAFRRQHPAFAKGGIEFQPVQGEVLSYTRKLGNETVLCLFNLSATPAKATLPEGNWEVLEGHGFASGLEGRSVELPAWGAFFARYA

SEQ ID NO: 5298 - protein, 302 aa, Xenorhabdus sp.
MRNRTLADLDRVVALGGGHGLGRVMSSLSSLGARLTGIVTTTDNGGSTGRIRRSEGGIAWGDTRNCLNQLITEPTVASAMFEYRFGGSGELAGHNLGNLMLKALDHLSVRPLEAINLLRNLLKVNAHLIPMSEQAVDLMAVDAQGYEVHGEVNIDQLDCVPKKLMLYPHVSATKEALEAVEQADLILIGPGSFFTSLMPLLLLEDLTQSLRRSNANMIYIGNLGKELSHAAADLSLKDKLEMIENTIGRKMINAIIVGPRTDISQLDDRIVTQQVLEAQDVPYRHDRELLRQAIEDTLQKLG

SEQ ID NO: 5299 - protein, 96 aa, Xenorhabdus sp.
MEKTRISIQKAVFNVGEEYQWLAQSDEDGAIVTFTGKVRNHNLGDNVQALTMEHYPGMTENMLHKIVDEARQSWPLQRINIIHRIGKLYPGDEIVF

SEQ ID NO: 5300 - protein, 81 aa, Xenorhabdus sp.
MIKVLFFAQVRELVGTDSLELPNDYPTVAHLRRSLLEKGERWALALEDGKLLAAVNQSFVHAEHPLNDGDEVAFFPPVTGG

SEQ ID NO: 5301 - protein, 92 aa, Xenorhabdus sp.
VHENPQIKKIAVTTNGYRMERDVTRWKEAGLTAINVSVDSLDPRQFHAITGQDKFFQIMRGIDAAFETGFSTVKVNAVLMTNINETCMPAVP

SEQ ID NO: 5302 - protein, 263 aa, Xenorhabdus sp.
IHSLTIAGTDPSGGAGIQADLKTFSALGVYGTTVITALVAQNTTGVQAIYDIEPSFLAAQLESVLSDVRIDSIKIGMLSNVANVKVVAEMLHRYPVPYTVLDTVMLAKSGDPLLSEEATTAMTELLLPVVSLITPNLPEAAALLKCSSAETEDEMLQQGRKLLSMGCQAVLLKGGHLTDGESPDWLFTPEGEWRFTASRVNTHNTHGTGCTLSAALAALRPRYEDWQSTVPVAKAYLQNALVQADKLDVGKGIGPVHHFHQWW

SEQ ID NO: 5303 - protein, 349 aa, Xenorhabdus sp.
MTDIVKLLGKDAESLLQHQCSTIPRENLYIPGADFVDRVMIENNRPNAVLRSMQTLFNHGRLAGTGYLSILPVDQGVEHSASASFAANPLYFDPKNIVELAIEAGCNCVASTYGVLASVSRRYAHKIPFLVKLNHNETLTYPAEYDQTLYASVEQAFNMGAVAVGATIYYGSHESRRQIEEISAAFERAHELGMVTVLWAYLRNSAFKKDGVDYHTSADLTGQANHLAATIGADIVKQKMAETNGGYTAIGFGHTDKRVYTELTTEHPIDLVRYQLANCYMGRAGLINSGGASGANDLNDSVRTAVINKRAGGMGLILGRKAFKKSMKEGVALIHSVQDVYLDKSVTIA

SEQ ID NO: 5304 - protein, 458 aa, Xenorhabdus sp.
MFTPELLSPAGSLKNMRYAFAYGADAIYAGQPRYSLRVRNNEFNHETLAQGIKEAHELGKRFYVVVNIAPHNAKLKTFIRDLKPVVEMGPDALIMSDPGLIMMVREAFPEMDIHLSVQANAVNWATVKFWKQMGLTRVILSRELSLEEIAEIRQQVPEMELEVFVHGALCMAYSGRCLLSGYINKRDPNQGTCTNACRWEYNVQEGKEDDTGNIVHTHDPIPVKNIEPTLGQGTPTDKVFMIEEAKRPGEYMSAFEDEHGTYIMNSKDLRAVEHVDRLTGMGVHSLKIEGRTKSFYYCARTAQVYRRAIDDAVAGKPFDPTLMSTLEGLAHRGYTEGFLRRHTHDAYQTYEYGYSVSETQQFVGEFTGNRINGLAEVAVKNKFLVGDNLEIMTPAGNINFVLASMTNKKNQAVEVAPGDGHIVYLPVPEEIELNYALLIRNLKAGNTRAPHTNTVPKK

SEQ ID NO: 5305 - protein, 114 aa, Xenorhabdus sp.
MAIGHYDLKKAKNGQFYFNLVAANGDIILSSEMYTTKAAANKGIHSVQVNSPDKARHEVRKNKSGKTYFVLKARNHQIIGISESYGDETTMKKGMQSVMKTGVTDKIRDLTKGS

SEQ ID NO: 5306 - protein, 169 aa, Xenorhabdus sp.
DAKALFCGERSWNYRELNESVNRLAASLHRRGVRQGQTALVQLGNEAEFYIVFFALLRLGVVPVNALYSHQSSELTAYALQIKPQILIADRQHRQFHDDVLIDRLIDKCPELNIVVLHHTDSDHSLSRLISEEPGDFTPTPTPADEVAFFQLSGGSTGTPKLIPRTHND

SEQ ID NO: 5307 - protein, 108 aa, Xenorhabdus sp.
MAVYCASKAAMRSLCLSVGLELAPFGVRCNIVSPGSTLTPMLEGMLNGDIAHQRLIHGITEQFKLGIPLGKIAQPDEIANVILFLASEQASHITLQDIVIDGGATLGA

SEQ ID NO: 5308 - protein, 294 aa, Xenorhabdus sp.
MSIPKLQDYTLPDEATLPVNKVEWQLEPQRAALLIHDMQEYFLNFWGKESKMVQQVINNIVILRARCHELGIPVFYTAQPDQQSDVERALLNDMWGPGLNRYPEQQKIAAALAPEQQDTVLVKWRYSAFQRSDLETHLKERQRDQLIICGVYAHIGCLTTATDAFMRDIQAFMISDALADFSREEHMMALRYTAGRSGQVLSTDMALSALDSPATENRWDRDRLLTILQSTLDEDVCDIDDDENLLDYGLDSLRMMSFVSKRRLEGYELDFTALMKQPTLRNWLVLLNGELEAR

SEQ ID NO: 5309 - protein, 292 aa, Xenorhabdus sp.
FYAGGQVILVPDPSPDGCFPAIERHQINLVALVPPAVSIWLEYTTLRGHADELASLEVMLVGGAPLGETLARRIPAELGCQLQQVFGMAEGLVNYTRLDDDDTHTFTTQGRPISEDDEIWVASQEGLPVPLGEPGLLMTRGPYTFRGYYRSPEHNQTVFDSHGFYCSGDVVIQLPGGYLKVVGREKDQINRGGEKIAAEEVEHLLLRHPAVVYAALVAILDPLMGEKTCAYVVTREHESVKPVVFRRWLREQGIADYKIPDRFESLPKLPLTPVGKINKQALRALANAVLDN

SEQ ID NO: 5310 - protein, 138 aa, Xenorhabdus sp.
TIPEPSLLSTLTFWHLATEIQGILTSDRETALSLACLLHPTPALCGAPYTSSRNLIGELEPFDRGWFGGIVGWCDAHGDGEWVVAIRCGKVRSHQIELFAGAGIVPDSVPENEWMETRTKFNTMLSALGFATQQEQTL

SEQ ID NO: 5311 - protein, 1178 aa, Xenorhabdus sp.
CSKGLIRDELNQLHLQLELEALSDSDIFLLLQQSINTTETLRQIAELAQLVVNYPQPVHLFGAICDQEQLGFLQQSSEIEAAITRVQAKEKSRNALGLLEPYLTIQTQQRFSSAIEHQASINHYLIALQTALPTLKPYLEYSLLSTDFSEIHREILALLRPYADAFSQFSDTELLHTIEQTLKHHYYLALKTLFESRTPALSTEPDVLNNNSQQLEKELAELQTLNRESLNKGLEYQQISPRSVWEEITRLTGKRARRLREFIEEGEALGLMRLRPIWLMTPDIASQILPLRPGFFDTVIYDEASQMPIEYALPTLYRSKQMIVSGDDKQMPPSSFFSGSINNDLEDGEDNDSPEQQQKKSDNEWDYRQLVECPDLLHLARTVLPVYTLDIHYRSAYRDLINFSNHAFYEKRLNIPAQHSETVLSKIKPLSLEMVNGTYHNQTNPEEAKAIIIRLAEIWRIPFESRPSVGIVTFNQKQAQLIHQLLIELTETDTNFCQSYIQEMQRQEQGEDMALFVKNVENVQGDERDVILFSTTFGRNKQGTFRRNFGVLGQTGGERRLNVAITRARKQVVIFSSMPLDEISDLFASYRKPEIPRDFLQGYLMFSRNLSIGQDEQNQALLNKMCLTDTGFNDHNQMSDGFVQSVIDFVQNQGWQIANVQQAGVFYFDCIIEDTQSGKYIIGLECDMPNHSLLQQARAREVWRPTVLKNVVPACYRISIVEWFHQPDIAQRKLVTAITQAFSAQHMNIYKSPTGIVMSSSLHRIKVRKQHFIACQRSHARLKKYYQRLEQISQSLSHIDEARNKPFSQVFQSLSMRMEKGTTMSPNEMDTLQNNIEKFTQDIQGEIALLEAELLEEQEREVRTSYHRSKNLKFVTDLLDDKLPDSQPSLDMALIHSLQNDTESTSDSLYQAPISAQTTAQFEQIEAMIIRLGILDNQQDLTPYQTQYQKILLLNDKAQKQLKADSLIFELATEIRQIQHLQNLRVQLAVTIAELEILEDEEAVMIAREAGNLVQQGSLAEITNHLALVNDAITRIEQRITAAERRNVVLAGLRELGYQINENEVNAWLTDGQVVISHPLTPDYGLELGAGGEESTRFQVRTVAFSEERDTTRDRDIDAIWCQQHHQLQENLTKAGAELTIDRALPPGSGKMKVREPHNVSRQQRVVNHRKKTKMHQK

SEQ ID NO: 5312 - protein, 168 aa, Xenorhabdus sp.
VTDNNPKKDFIIRNINEIELDNFERSPLYASHGGSLTEGTQASKLGASVDCVPPGKRAVPYHFHYSQEEMFIVIKGSGTLRIAGDMIPIKEGDVICIPPGDKYPHQIINTSNEMLRYVSISTMESPEICEYPDSNKYLAKAKSDVNGMKRFRAMNFMGEGVDYWENEP

SEQ ID NO: 5313 - protein, 595 aa, Xenorhabdus sp.
MPTPQGQPPSEPQDKISAEINRYQAIIDNAGNQPSLEVIRAYIAMEPNIENEAAHQQNIDDTWQALTHLTAQQLSELVINANEYTLQGWLDLLNAYQANKQDTDKLRSAIRDWQIRYPENPAVQSLPSSLKQMLHVTQVQQASIGLFLPLSGQAKAFGDAIRQGFLDAQKGLPKPELPVSTSAVAPSSAVDNTSVDTDSVDTNSVDSIITNAVETDQANTADTTETDMTGQFTINSVPVNHQVVKIYDTDSQPLANLLAQAEQDGVTLVVGPLLKPQVEQLVQINTPLNILALNKPDTTQLHPNFCYFSLSPEDEAKSAAQHIWQQQKHNPLVLVPRSVLGSRVANAFATEWQQLGGSEVLQQSFGTVAEMRQSMNRGVGIRMSGTAIPVSNSVPDANETQFSDTTQSDKHLPIVTSTSRGPVDAVYIVATTDELTLIKPMIDMAISSRKKPALYASSRSNKADAGPDFRLEMDGMQFSDVPLLTGANVPLMRQAASKFGNDYSLMRLYAMGVDAWSLANHFTQLQQASGFTMNGESGELSATNDCTIYRQLPWMQFSNGRIMLESRMTENSVTGNTDSTMNNATENSATDNHAG

SEQ ID NO: 5314 - protein, 125 aa, Xenorhabdus sp.
QINRYAQGCHYEQQVKQFLQKQGLVFIAENVKIRGGEIDLIMRDKQVWVFVEVRFRQNAQYGDAIATITQSKRRKLLHTASVWLYQRNESLDTAACRFDVCAITGQKFEWLKDAFNLNENLSDRF

SEQ ID NO: 5315 - protein, 194 aa, Xenorhabdus sp.
DRIKVCFTESIQTQIAAAEALPDAISRAAMMMVQSLLNGNKILCCGNGGSAATAQRFAASMINRFETERPSLPALSLNADNVVITAIAGSRQPEEIYAKQVRALGQAGDVLLAISTHGNSRAIIKAVEAAVTRDMTIVALTGFDGGELAGLLGPQDVEIRIPSHHSVRIQEVHMLTINCLCDLIDNTLFPHQDD

SEQ ID NO: 5316 - protein, 191 aa, Xenorhabdus sp.
MRLLSLLLVFCSTMLLQGCIGAALVGSAAIATKAGTDPRTVGQQVDDTTLEARVSNAISKDPQIKSQTRIVTTVYQGKVLLTGQSPDMQLAERAKQIASRTEGVSVVYNEIRQGKPVSLGAASVDAWLTTKVRSKILASDAVKSSNIKVVTENGEVFLFGIVTRQEGADAAKIASETDGIKRVTTAFTYLD

SEQ ID NO: 5317 - protein, 268 aa, Xenorhabdus sp.
MNQTNRAVVTTSTLYVVPTPIGNLGDITQRALEVLKHVDLIAAEDTRHTGLLLQHFAINARMFALHDHNEQQKADQLIAKLQQGLSIALVSDAGTPLINDPGYHLVRRCREAGISVVPLPGPCAAIAALSAAGLPSDRFCYEGFLPAKSKGRQDALRDLAQESRTMIFYESTHRLLDSLEDIVEVWGAERYVVLARELTKTWESIQGMPVGELLAWIREDETRRRGEMVLIVEGYHKPADDSLPPEALRTLALLQKELPLKKAAALAA

SEQ ID NO: 5318 - protein, 401 aa, Xenorhabdus sp.
MSNKRRTYFFCFAALVVVIAAIFFAWNHFKTSQKSGPQQNLATEPPRPVQAATAKMESVPHYMVGLGTVQAADTVNVTSLVSGQLIALHFIEGQEVKKGDLLAEIDPRPYQVRLAKAQGQYVKDQAMLANAEQDLARYQQLAKSKLISQQDLDKQHALVRQYKAALKSDQAEIDEQKLQLAYSRITAPISGRVGLKRIDVGNYISSGGEKPIVVITRVDPIDVLFSLPENDLSAILKAQKNNTIPAVIARDRNNQLQLAQGKLLSIDNQIDVATGTIKMKARFDNQDNTLFPNQFVNIQIKVNTLDNAIVIPDAALQMSGNGHFVWLVGKDNKVKKHKITIVLQNDNLVIINSGLSVGDRVITDGIDQLTEGAAVEIVKPLQPKSDNSNDKSAKSNSKVEK

SEQ ID NO: 5319 - protein, 458 aa, Xenorhabdus sp.
PVTGGGPSRLFILRPVATTLFMIAILLAGILGYRMLPVSALPQVDYPTIQVVTLYPGANPDVMTSAITAPLERRFGQISGLKQMSSQSSGGASVITLVFQLSLPLDVAEQDVQAAINSSINLLPNDLPYPPIYSKVNPADPPILTLAVTSDALPMTEVQDMVETRVAQRISQVGGVGLVTLAGGQRPAVRVKLNAQAIAAQGLDSHAISNAIVSANVNSPKGSFDGPTRSITLSANDQMKSIDDYRNLIVTYKNGAPVRLRDVATIEREAENTKLGAWANEKPAIVINVQRQPGANVIETTDNIRSVLPELISSLPKSVKVDVLTDRTVTIRASVKDVQFELLLAVALVVMVIYLFLRNAAATLIPSIAVPLSLIGTFAVMYFCGFSINNLTLMALTIATGFVVDDAIVVIENISRYIERGEKPLAAALKGAGEIGFTIISLTFSLIAVLIPLLFMGD

SEQ ID NO: 5320 - protein, 82 aa, Xenorhabdus sp.
MPKDLQEYMKKTEYCEYLAGEWDSDLSDERKRLLEDEINIYCKRANELFYELKEKYKDDPRKMEIVNEHSELIKYYTEKPIE

SEQ ID NO: 5321 - protein, 159 aa, Xenorhabdus sp.
MANMIYLTLQGNKQGLISQGCSSVESIGNKYQAGHEDEIFVLNLHHSIHREQNVNHSPIVFVKPQDKSSPLLMMAISDNESLNLKFDFYRTSQLGSQELYYSIECRDATIIELSPNYPHSINHAEAQPEEIVSVKYKDIISRHHMAGTSGYSVWDERVY

SEQ ID NO: 5322 - protein, 342 aa, Xenorhabdus sp.
MAHIITHIHPAREVWLQQLTDVITDPSELLQLLSLNTHALLKEGNEARRLFPLRVPRAFVSRMKKGDPQDPLLLQVLTAREEFDTPAGFSTDPLDEQHPVVPGLLHKYRNRALLMVKGGCAVNCRYCFRRHFPYEDNKGNKSNWQSALEYIEQHTELDEIIFSGGDPLMAKDHELDWLITQLESIPHIKRLRIHTRLPVVIPDRVTLSLCNRLAQSNLQVIMVTHINHANEIDEAFRESMARLRQAGVTLLNQSVLLRGVNDDADILADLSNSLFDAGILPYYIHVLDKVQGAAHFLVSDEEAKAIIRELLTKVSGYLVPCLTREIGGEPSKTPLDLGLKNN

SEQ ID NO: 5323 - protein, 188 aa, Xenorhabdus sp.
MATYSTNEFRSGLKIMLDGEPCAILDSEFVKPGKGQAFARVRIRKLISGKLLEKTFYSGIQFESADVMDVNLTYLYNDGEFWHFMNNETFEQLAADVKAVGDNAKWLIDQAECVLTLWDGRPIAVTPPNFVELEIVDTDPGLKGDTAGTGGKPATLSTGAVVKVPLFVQIGEVIKVDTRSNEYVSRVK

SEQ ID NO: 5324 - protein, 438 aa, Xenorhabdus sp.
  unsure (1)..(438): unsure at all Xaa locations
GPCALKIVXFEVFITEKWANFPFLSANIYQTSTNKRLFKPYVIFDKQGVKIAVIGLTTDDTAKIGNPANFPDVEFRVPAKEAKKVIDELKKNEKPDVIIAATHMGHYDDGHHGTNAPGDVEMARSLPAGYLDMIVGGHSQDPVCMSAENKNYKQVDYVPGTPCSPDRQNGTWIVQAHEWGKYVGRADFQFRNGEFKLMHYQLIPINLNKRVKQEDGSTERVYYTQQIPQNAEMLKLLTPYQDKGNQKLSVKIGSVDDKLEGDRSKVRFIQTNMAHLVLAAQMERANADFAVMSGGGIRDSIEAGDITYKDVLKVHPFGNQLIYVDFKGSEVLPYLTAAANMEADSGAYGQFYNVSFVKEGKSISDVKIAGKPLDLNKTYRMATLNFNAIGGDGYPRIDNLPGYVNTGFVDAEVLKGYIEKHSPLKAADYDPKGEIVFK

SEQ ID NO: 5325 - protein, 93 aa, Xenorhabdus sp.
MQSARAIKQITLPASWAELPWGEYYRVALEHQLEPWWPKIFGFHLVKVGNLSVEIDSRSCLISHQVNVGLKGESMNVIADPHYLPFEAKCRGC

SEQ ID NO: 5326 - protein, 72 aa, Xenorhabdus sp.
IDDPRSDINKKHELMDVIFLAFSAVLCGASGWKSIQEFGELQIEWLKQYTSFTHGIPRRHCVANIIKMIDQL

SEQ ID NO: 5327 - protein, 251 aa, Xenorhabdus sp.
MKLIRLPALSDNYIWLLCDENRHCVIIDPAESQPVMDTLAANQLIPIAILLTHHHHDHVGGVAGLLKQYPTLPVYGPEETQSKGATHVVHENDLIVTGNFSFQVLALPGHTLGHIAFYQAPYLFCGDTLFSAGCGRLFEGTAEQMFSSLEKIASLPDETLICCAHEYTAANMKFALAVLPENQAINDYHKKIIELREKDQATVPTTLKIEKKINVFLNCHDIDLQKNIGIKPNSIPLSSVFQQLRAYKDRF

SEQ ID NO: 5328 - protein, 266 aa, Xenorhabdus sp.
KSTIPLSIYILAFGVFSMVTSEFQVTGMVTIMADDLNVSISEIGYLVSLYALAMTFGGPLLTLGLLKTPPKTALLSLYLIFIIGEILGALADSYTVLAIARVITGAVSGAFFGMSVSICAEIVAKQQRGWAISIVLSGIMIGTILGLPMANLIGTYIGWRISFWTTSALATIAGIISLFWLPFIPKQSSISLRAEFHTLNNPELWRVFSTSLLIIGATFAAFTYFTPILKDVTGYQEETIASLLILYGIATIIGNIIVGKLADFRA

SEQ ID NO: 5329 - protein, 134 aa, Xenorhabdus sp.
MARIVLAAIATPGHVFPICTIARHLIGQGHDITIFSGALFRQQSEALGARFVAFDSIVDADYRNLEQTFPERALHPPGNAQTSFALKQFFAAPIPVLYPQLQQLVEDSDLLISDNTFYAILPLLQKPADEGIPF

SEQ ID NO: 5330 - protein, 276 aa, Xenorhabdus sp.
FGVLITPGREGQEITSLPVNMLRELVRNHLLVVLRGFSSGFTDPKKLTEYSQNWGEIMMWPFGAVLDVMEQAEPSDHVLDRTEIPLHWDGMYRQTIPEFQIFHCVSAPAVTQGGRTTFVNTEQLIIDANEHERHIWEKIMVTYRTSLVTHYGGEVVSPLICLHPNGRKWVMRYNEPMAVDSEKYSDHHSVKFEGFSSAQQSAFENELKDRLYAPCYLYIHQWQTNDVLISDNFTLLHGRESFVTRSSRHLQRVHIHGTPICNNKSFKMVDIPYLDR

SEQ ID NO: 5331 - protein, 329 aa, Xenorhabdus sp.
EKISEKILHELLQYRRRFPTSEYTIEYEEQYVAVVQLPRIRAFVKQSKTIQCILPAFPTKSPNLRKVLGTVPDMAEKLSLIFLNSLCQRIQLYYPPGANIAICSDGHVFSDLIRVNDETVTHYQLEIEKLLHELGATNLSVFTLSNVELFSQYTNDYNKLRNLLVNSYAFSSEKVKSILKGSEEGIQLYRAITRFLYEDSLLPEYVGSKNALQKDARQRAIGVIQRSWAWGHLLAGLFPDAIRLSIHPQPINSIKIGIHMMPTRDDWLTPWHGVAANINGQFILMKSDEVKKMKGKLVEIRGIPSHYVIDEVEEASQNQTFLTVASLAQ

SEQ ID NO: 5332 - protein, 196 aa, Xenorhabdus sp.
MASRGRPLSFDREVALQQAMEVFWSKGYEGTQLVDLTAAMNINPPSFYAAFGSKKQAFYAAVDLYIKTIGAKAMDSLNNAESVKQGLRAMLEVSVEVATSNQSGGCLLVLGIVNNLQENEDAYAYLKEVRQYTWKLIHTRIAKAVADGELSGETETGKLASYFLGVMQAISFQARDGVSREDLMCLIEPAMAVISL

SEQ ID NO: 5333 - protein, 95 aa, Xenorhabdus sp.
MMSDTTTLTIDALSQRVDEIFRKAGLNDVQSGALARVITAGERDACKSHGIYRIEGALRTVKAGKVKPDAIPEVAGDDGTAIVKVNANGGFANPA

SEQ ID NO: 5334 - protein, 85 aa, Xenorhabdus sp.
MMSCVLLWSPRVMGWDKRPGITLVTNNKASQPNTLDRRYQQMPGGISSLPDENKPAAKVVNDQNAQTSKEPDYLDIPAFLRKQAD

SEQ ID NO: 5335 - protein, 306 aa, Xenorhabdus sp.
MIKQRTLKRIVQATGVGLHTGKKVTLTMRPAPANTGVIYRRTDLNPPVDFPADAKSVRDTMLCTCLVNEQNVRISTVEHLNAALAGLGIDNIVIDVDAPEIPIMDGSASPFVFLLLDAGIEELNVAKKFVRMKDTVRVEEGDKWAELAPYHGFSLDFTIDFKHPAIDSSTQRYSLDFSADSFVRQISRARTFGFMRDIEYLQSQGLCLGGSFDCAIVVDDYRVLNEDGLRFEDEFVRHKMLDAIGDLFMCGYNIIGAFTAFKSGHALNNKLLQAVLAQESAWEFVTFEDEAEMPLAFRAPSTVLAY

SEQ ID NO: 5336 - protein, 176 aa, Xenorhabdus sp.
ILNLWRQFGRRYFWPHLLLSMVATGIGVPPVLAGAAESLPHTNTSSAQRNQNRALSSFEHLFQLQNAQRQPSNYLNYWQQHAVRNVIRQLSFAFSISEPVRYEEAKESIRVAVPFMQQIMLDTLHAMLIQAPTRFESAVGTETVAAISPDVHTPALWVAQIQGIRAGPAADHQSLL

SEQ ID NO: 5337 - protein, 775 aa, Xenorhabdus sp.
MLIKLLTKIFGSRNDRTLRRLRKSVDVINRMEPDFEKLSDEELKAKTEQFRARLKEGESLEKILPEAFATVREASKRVFGMRHFDVQLLGGMVLNERCIAEMRTGEGKTLTATLPAYLNALSGRGVHVVTVNDYLAQRDAENNRPLFEFLGLSVGINLPNMPAPAKRAAYAADITYGTNNEYGFDYLRDNMAFSPEERVQRKLHYALVDEVDSILIDEARTPLIISGPAEDSSELYIKVDKLIPQLIRQEQEDSDTFQGEGHFSVDEKTRQVNLTERGLVLIEELLVNAKVMDEGESLYSPSNIMLMHHVTAALRAHVLFTRDVDYIVKDGEVIIVDEHTGRTMQGRRWSDGLHQAVEAKEHVEIQNENQTLASITFQNYFRLYEKLAGMTGTADTEAFEFSSIYKLDTIVVPTNRPMIRQDLPDLVYMTEAEKIDAIIEDIKVRVNNNQPVLVGTISIEKSEVISNALTKADIVHNVLNAKFHAMEADIIAQAGQAGTVTIATNMAGRGTDIVLGGSWQAEIAKLDEPTEEQIEQIKAAWQERHDAVLAAGGLHIIGTERHESRRIDNQLRGRAGRQGDAGSSRFYLSMEDSLMRIFASERVTGMMRKLGMQPGEAIEHPWVTKAIANAQRKVESRNFDIRKQLLEYDDVANDQRRAIYAQRNDLLDVSDVSETISSIREDVFKVTIDAYIPPQSLEEMWDIPGLEERLVNDFDLSLPIKEWLDKEPELHEETLRERILEKAIEVYKQKEEIVGEEMMRNFEKGIMLQTLDTLW

SEQ ID NO: 5338 - protein, 115 aa, Xenorhabdus sp.
VLETGNASWKTRLYYEIPVLLSALRSEILPSLSSIDIRINPSLMVKSHNNEQSAEKISERKLNNDSQSLPTRQLSHESAETLIALAERSPEKLKRRLERLAALAGESTSTAKMKR

SEQ ID NO: 5339 - protein, 343 aa, Xenorhabdus sp.
MIRLNQVNKVFQQGTRCIKALSDINLHVPQGQIYGVIGSSGAGKSTLIRCVNMLECPTSGQVLVDGQDLTSLSERELTRARRQIGMIFQHFNLLSSRTVFDNVALPLELNNTPKAEIKKKVSELLELVGLSEKHDAYPANLSGGQKQRVAIARALANSPKVLLCDEATSALDPATTRSILELLKDINRRLGLTILLITHEMDVVKRICDQVAVISGGQLIEQDVVSAIFSHPKTPVAQEFIQSTLHLDIPEDYLQKLQSEPASDKCPLVKLEFTGKSVDAPLISMAVRRFNIDISILSSQMDYAGGVKFGVMLAELDGENSSIESTITFLKEHHVKVEVLGYV

SEQ ID NO: 5340 - protein, 217 aa, Xenorhabdus sp.
MSEGMILLLAKGVWETLVMTFVSGFFGFVIGLPAGVLLYVTRPGQIIENGTLYRILSALVNITRSVPFIILLVWMIPFTRLIGRTSIGLQAAIVPLTVGAAPFIARMVENALLEIPSGLIEAARAMGATPLQIVKKILLPEALPGLINAATITLITLVGYSAMGGAVGAGGLGQIGYQYGYIGYNATVMNTVLALLVVLVFLIQLGGDYLVKAVNRK

SEQ ID NO: 5341 - protein, 271 aa, Xenorhabdus sp.
MSVKLKSIAVIGALLGTLALTGCGQEPRDPNHIKVGVIAGPELQVAEVAKKVAKEKYGLDVELTTFNDYVLPNESLSKGDIDVNVFQHKPYLDQQIKERHYKLAIVGNSFIFPMAAYSKKIKSLDELQNGSQIAIPNDPTNQGRALLLLQKQGLITLKAGVGLLPTILDITSNPKQLDIVQLEAPQLPRSLDDQKIALALINNTYAGQIGLTPEQDGIFVEDKDSPYVNIIVSREDNKDAENVQKFVKAYQSPEVEQEAQKVFKGGAIKGW

SEQ ID NO: 5342 - protein, 130 aa, Xenorhabdus sp.
QQLKEVLATNQPHRIIIKPWKNTRSQSQNATAHMWFGEISRYLKAQGANYSPEAVKDMLKHTFLGYEVVDRVDARTQEIEHVRTLRQTSKLDTGEMFRFMEQVEQWAAGIHCFVTIPENSEYMRLKWRQE

SEQ ID NO: 5343 - protein, 266 aa, Xenorhabdus sp.
IITCDKSVVVLAGAGSGKTELLAQKANYLFVTDKCAWPKRILSLTFKTEAQINIKERIKKRCGYKSNRFDSFTFHAFCKSIVDRFKNILPESERPINNYDIVFKKNDANGRNKILMDNLLSLAINILRTSDDVRNIFSYSYEYVFVDEFQDTTDNQYELLKLLFKDTNTKILTVGDIYQSIMLWAGARRTVFSDFSDDFSAVKKYLIKNYRASNEIQNVLEIVLQYIKNPKQPISILPQQLSNCSVHIFSDEQQEAYFIVNSINEL

SEQ ID NO: 5344 - protein, 133 aa, Xenorhabdus sp.
VYFSTPLDIDYSLICSFPDIFCEKDEIYGERGPSEGKEDEEDEDIAKRENALVKAVLKKGNTGKRFEFGDKWERNFLWYRYRFLSNKSKPASHVRMFTQIENKYDSDQIKNKLPPELKRLAERIIQLIEKVVE

SEQ ID NO: 5345 - protein, 93 aa, Xenorhabdus sp.
MGSEFAYEDLASEEIEKYKMYNYLGEKPCGQQICFIVERKPVDKESGYVRQIVWIDKDFYRFIRIDYYDRRNALLKTRTFDDYQFYMDKYWRS

SEQ ID NO: 5346 - protein, 763 aa, Xenorhabdus sp.
YLNLILVCIAVFFTFKGMENLAFTSSYKVFFSRENPFLNSYESMQKTYSNGDSALIVLAPKDGNVFSQRFLSIVEKLTEDAWQVPNAYRVDSITNFQSTKADDDNLEIRKLVPDAAKLTERSLSEIKKIALNEPLLIKRIISENGDVTAVNVSVRLPDGDDKIVAEVAESVRKLKSQYMKMYPDVDIHLTGVAMMSNAFPEISMQEMSKTIPIVFLVVLILCFMVLRSFSATFVVCLVIVFSIIAALGAAGYLGIKLTQVSANVPIIVMTLAVVDSIHILVTVIHRMKQGDSKHDAIKESLRVNLSPVVITSVTTAVGFLGLNLSDAPPFHDLGNMTAIGMGAALFYALFLLPSLIAVLPVRVKPGVQKTQFSLAFLANWIIDNRRKLQFGIVAFGLVMLTFIPRLTVDENFVKNFAKGLEIRDDSDFTQDHLTGLFNMEFSLGAGKEGGINEPEYMAKVDEFANWSRAQPGIMNVNVITDIVKRINRSMNGDNAAHYKLPTDREAIAQYLLLYEMSLPLGLDLNDQIDVRRSATKMTVTFSDLSTFEMQRIKEAHEKWLINNAPSSMHTHAASASLMYTYLMNTNIKGLLIGTLISFLIITLCLGIVFRSAKYALISMLPNILPIFMAFGLWSIIDGVVGLAAATIATMTLGIVVDSTVYFVYKYLRARREHNMTPEDAVRYSFSTVGIALLSTSIIFICGFGSMMHSDFLMNAQMGIFTVMTVIFALLLDFFLLPALLIAIDDKTKKNKPAVPDEPMMVKI

SEQ ID NO: 5347 - protein, 111 aa, Xenorhabdus sp.
GVACSMAAAGLAELLGASPEQVCIAAEIGMEHNLGLTCDPVAGQVQVPCIERNAIASVKAINAARMALRRTSEPRVSLDKVIETMYETGKDMNAKYRETSRGGLAIKVQCD

SEQ ID NO: 5348 - protein, 321 aa, Xenorhabdus sp.
VSIAIMIGTHGAAAEQLLRTTEMLIGEQENVSYIDFVPGENADTLFEKYNKRLESLDTTQGVLFFVDTWGGSPFNAANRIAVDKENYEIITGVNVPMLVEAFMCRDDDPSMEELVAVALETGREGIRALKTEPEEEASKPEPAKPAAPVASQVSTPAAGGHMKIALARIDDRLIHGQVATRWTKETNVKRIIVVSDEVAQDTVRSTLLKQVAPPGVSAHVVDVEKCVRVYNNPKYADERVMLLFTNPTDVLRIVEGGVSLESVNIGGMAFRQGKTQINNAISVDASDITAFEKLNSRGIELEARKVASDARLNMMDLLKKA

SEQ ID NO: 5349 - protein, 265 aa, Xenorhabdus sp.
MEITVVQLFLIFIVACIAGMGSILDEFQFHRPLIACTLIGLILGDVTKGIIIGGTLEMIALGWMNIGAAIAPDAALASIISTILVIAGGQQVGAGIALAIPLAAAGQVLTIIVRTLTVGFQHAADKAAENGNLRAITALHISALVLQAMRIALPALVVALSVGTSEVQNMLDSIPEVVTTGLNIAGGMIVVVGYAMVINMMRAGYLMPFFYLGFVVAVYVHNLVILGVIGAVMAILYIQLSPKYNRSQAAAPAGNTPNNLDNELD

SEQ ID NO: 5350 - protein, 288 aa, Xenorhabdus sp.
MNNMSDTTNMGQKKLTQSDINAVFLRSNLFQGSWNFERMQALGFCFSMVPAIRRLYPENTEERKLAIKRHLEFFNTHPYVAAPILGVTLAMEEQKANGADIDAGAINGIKVGLMGPLAGVGDPIFWGTVRPVFAALGAGLALGGDWLGPFLFFFLFNLVRLLTRYYGVAYGYKKGIDIVKDMGGGFLQKMTEGASILGLFVMGALVNSWTKIDITLVVSKVPDPTSGEMKINTVQTILDQLLPGIAPLLLTFGCMWLLRKKVNPLWIIIGFFVIGIIGYYFGLLGVAK

SEQ ID NO: 5351 - protein, 222 aa, Xenorhabdus sp.
MLIAQLDNSYEFPHPDTALAEPNGLLAFGGDLSAERLKTAYRKGIFPWFSPNELPLWWSPDPRAVLIPGELHTGRTLRRFIRKHPYQITVNYAFEQVVYGCAQRQEGTWIGSDIQLGYQTLHQEGLAHSVEVWHKQQLVGGLYGVNIGTLFCGESMFSKMENASKCAFVAFYHHFLRHGGQLFDCQVLNHHTESLGAKNIPRKEFLRHLDQYQKQSLQTGCW

SEQ ID NO: 5352 - protein, 59 aa, Xenorhabdus sp.
MIAFGIGQDAGEILSLEYFWRPVILYGGLAPGNQTVGRHDAKNGDRMPQKRTWMHSPFC

SEQ ID NO: 5353 - protein, 50 aa, Xenorhabdus sp.
MFWENRVLGNYILEDGVLVSRILVNRVLGNCVLEDYVQAPNLGYRLSFSL

SEQ ID NO: 5354 - protein, 164 aa, Xenorhabdus sp.
MIDNKKRPGKDLDRIDRNILNELQKDGRISNVELSKRVGLSPTPCLERVRRLERQGFISGYTALLNPHYLDASLLVFVEITLNRGAADVFEQFNTAVQKLEEIQECHLVSGDFDYLLKTRVPDMSAYRKLLGETLLRLPGVNDTRTYVVMEEVKQSNRLVIKTR

SEQ ID NO: 5355 - protein, 580 aa, Xenorhabdus sp.
MRILLPFLALYRRHWFLISLGMVLATLTLLASIGLLTLSGWFLAGTAVAGFAGKYTFNYMLPAAGVRGAAIFRTAGRYGERLVSHDATFRVLAHLRVFTFQKILPLSPGGIARFRQGELLNRIVADVETLDHLYLRVLSPLLAALAVIVVLTLGLGFLDWTLAYTLGGIMLGLLLILPFVFYHTGKPYGRNITALRGQYRTLLTSTLQGQAELTVFGALKRFRQTMSEVEYQWLKSQQQQANLTGLSQAIMIFATGMTVTLILWLAAADVGGNNQPGALIALFTFCALSAFESLGPVTVAFQHMGQVISSATRVSQLMHQKAEVIFPADGPKSTDNLSLEIKNIEFTYPNQPMPVLQNISLSLQAGEHIALLGKTGCGKSTLLQLLTRAWDVDNGEILLNQQPISLYDEATLRSMISVVPQRIHVFSHTLRENLLMAKPGAPDEELETVLQQVGLGNLLENNEKLNCWMGEGGRQLSGGEQRRLGIARALLHNSPLMLLDEPTEGLDADTEQQILALLRHSCQDKTLIVITHRLTGLQHMDRICVMDGGRIIEQGQHDVLLSQQGRYYQFYQRQSYPDQE

SEQ ID NO: 5356 - protein, 589 aa, Xenorhabdus sp.
MDKTRQSELVRWLKQQSTPARRWLRLSMLLGLISGLLIISQAWLLASILQALIMDHVPRENLISQFAMLLASFTLRAIVSAIRERIGFICGKVVRQQIRSMVLDKLTQLGPVWVKGKPAGSWATIILEQIEDMQDFYSRYLPQMTLAATIPVLILMTVFPINWAAGVILLVTAPLIPLFMALVGLGAADANRRNFTALSRLSGNFLDRLRGLETLRLFHRGKAEVKQITESTEDFRLRTMEVLRMAFLSSAVLEFFAAVSIAVVAVYFGFSYLGELHFGSYGLGVTLFAGFLALILAPEFFQPLRDLGTFYHAKAQAVGAAESLFTLLTSGEEHASYGGKKILSDKNAVSIEANELEILSHDGHRLAGPLNFTVEQHQRIALVGKSGAGKSSLINVLLGFLPYRGSLKINGSELNELDLDKWREQLSWVGQNPHLPEQTILDNIRLGQFDATQEQIQSVMQQAYVTEFVSELPDGINTVIGDNAARLSVGQAQRIAVGRALLHPCQLLLLDEPAASLDAHSEQRVMTALNQASSQQTTLLVTHLLEETPEYDQIWVMESGLIIEKGNYESLRQSQGAFSRLLSHRSMEL

SEQ ID NO: 5357 - protein, 319 aa, Xenorhabdus sp.
MSTAKHSKLIILGSGPAGYTAAVYAARANLSPVLITGVEKGGQLTTTTEVENWPGDPEGLTGPGLMERMFQHAEKFQTEIVSDHIRKVDFSKRPFHLYGDDQEYSCDALIIATGASARYLGLPSEEEFKGRGVSACATCDGFFYRKQKVAVVGGGNTAVEEALYLANIASEVHLIHRRDTFRSEKILIDRLMDKVKNGNIILHTDRTLDEVLGDEMGVTGVRIRDTKSDNTEELDVAGVFIAIGHSPNTDIFAGQLELENGYIKVQSGLHGNATQTSIPGIFAAGDVMDHVYRQAITSAGTGCMAALDAERFLDGLATK

SEQ ID NO: 5358 - protein, 504 aa, Xenorhabdus sp.
MTANSYLEYFLTLLGWVINNGLWHILIATGLFTLPLVVKVIAVWLTVRECGEEDGQAGLQSLARIENTLYGAFFVMVVCCVPLANVSLTTLQYDTSRAKSCGTWTPTIPDNSGYAPVISSLNNQTAAVPLWWAVVHRLSKGLTQAAVASIPCRPDLRQLRFDVQHTRISNPALAAELQDFTHDCYALALYQWKQRDQEHITDPIILNDIGWLGSRTFLAGDYRTLQSRLPRADFPWQERRDNGRPYTGQGGYPTCQAWWSTAQTGLKDRVLAQADPGLWLRLSATLKILGKNTPAYQEAVIRRLVSPVNLTISQEGYVYAGYGGNADPTLLDGANRIGTSAGALLGGLLSMPMFDAVRQALPMMQAVILMALYILIPLIVLFAAYEFKTIFTLTFVIFALNFLTFWWELARWLDSHLLEALYGSDTHSLFNLAGIQNTSDDLIMGLVMGTLFIVLPMVWLGALAWAGVRMGDMAGMMSQGVGQVRQSAGMFGQLVMQKMMSKGK

SEQ ID NO: 5359 - protein, 91 aa, Xenorhabdus sp.
VMGITLATGWVGLHQAEKLNRIHHWVTETGGVWFVWRLGLYAGLGWGGQKTWQRVKHLPEYRAMLIRMMVASLLFILLGEYALSGTIKEIR

SEQ ID NO: 5360 - protein, 477 aa, Xenorhabdus sp.
MKKNALWLIVGGLVIASAQANTTGLSLILPQVNRSALGYGADASGAVSDTLFYTLGGGSVISEPASRSSSTTLGGLELGWRSDLMCGNFDLKATVSNQLNGITAGFKNLMSDVIQGATGAVASLPAMIIQRANPGLYDMLTNGVLQANVAFDKAQFNCQAMANKMMDFAQNNKWTQSAALQEYKSLVNGGDGDAVRVNNAGSKATGAGGHPWIGGQRQGGKGQHAIRPTRDLASAGFNMMNQLPVLSQSSVSSLKCEGSACRKFSHAREAADAVVRVLGDRVIRTCAQAADCTSGGETHQPGTTVAGTGFAPMLEAHTKTNTEQLVKLVSGAEKPTMVNLAKLKTGSLTVTKGVIQALQRDPDRAALTGRLAGELAMAETVETALLMRRMLITGMSEPNAAAQSEALAEGERRIAALDREINALKNEMQLKQALSRNAILTIIERDTQRINMHPQKQVPDNTDARFYQLEAPNRERR

SEQ ID NO: 5361 - protein, 160 aa, Xenorhabdus sp.
VPYFLSTLDSVAWRSGLPESFYPEALIPGQRELGSQMAGTMWGNIYPRSGFINQTDDDKASAVVAQRVADIITRVGQPHVYQTLKGTRTAGYWPPEPVTENTGSKNHQWQRLSPQLSQSCAVFPDGEHTAAIDGNQAYALWQPYSCCQRRGQRFLSSTDI

SEQ ID NO: 5362 - protein, 208 aa, Xenorhabdus sp.
SSSFIEGIFDSLPIVIGYIPISFAFGLSAVKLGFSPLEAIFFSCVIYAGASQFVITALLSAGTSLWIAALTVMAMDIRHILYGPALRYRLKQKLSQKKTVIWAFGLTDEVFAAATTKLIKDQRSWSENWMVAIAMCSWLSWVLGTIAGALLGNGYLESYPAIEAAMIFMLPALFLSFLLSSFKKQNNYCVIASLAGALIGVMFFSIPV

SEQ ID NO: 5363 - protein, 107 aa, Xenorhabdus sp.
IDHNIFIIGMVVGIANFLFRYLPLCFGSNRSPGAKMGNIGIILDSIGVASICSLLIVAGIPEVMRAHNKFFPTLLGCLAIGICFYKTRSIIISTLSGAAIFGLTFKV

SEQ ID NO: 5364 - protein, 76 aa, Xenorhabdus sp.
FLLKVSLMSKIKGNVKWFNESKGFGFITPEDGSKDVFVHFSAIQSNGFKTLAEGQKVEFEITEGAKGPSAANVVAI

SEQ ID NO: 5365 - protein, 158 aa, Xenorhabdus sp.
MYHHYLNTPEGFPKPYVHVTANDEGVTSIYFVNEKKELESKNAITKQCVKELQEYFKGKRDTFTVPLSMQGTEFQQRVWKQLCNIPFGEMWSYKQLALTLGSVNYCRAVGMANSRNPISLIVPCHRVIGHDGKLVGYTGGLNIKEWLLEHEKKKKVKK

SEQ ID NO: 5366 - protein, 30 aa, Xenorhabdus sp.
MLALAIAEPLYGFMRNTVFGHMASQINAEL

SEQ ID NO: 5367 - protein, 125 aa, Xenorhabdus sp.
MDSDMSEKFVQTISSVNYNKGVFSLYFVGQDPKRMANGVLAENDQELELKQVIHMPASGFMYMVSMVKGMLEDPRMEAEINKLIAAGFLPMPEIDESPVTAEADNTVADAEQPEKRAARNTKKSK

SEQ ID NO: 5368 - protein, 209 aa, Xenorhabdus sp.
MVVPSTFWLGLGYFTYFFSFGIFLPFWSVWLQGEGITPSMIGIILGIGLVSRFVGSLIISPTVKDPAKLITALRLLSFLALIFAVSFSFGSHWAWICLVMIGFNLFFLPVVPLSDALAGTWQKQLTFDYGKGRVWGSMAFIINSSLTGISLSSSGIDFGSSITISFDKLNDWIGGILFGHHQIMLAYLFITVAIMLSGMMLKPYIMPEG

SEQ ID NO: 5369 - protein, 111 aa, Xenorhabdus sp.
VTKENEMVRQEIETKLRAAFKPSHLEVIDESYRHNVPAGSESHFKIIVISNAFIDQRMLNRHRSVYSTLVNEMAGGVHALALHTYTEKEWMELEDTVLNSPACRGGTATTS

SEQ ID NO: 5370 - protein, 434 aa, Xenorhabdus sp.
MQVSVETTQGLGRRVSITVPAADIEKAVNSELVNVAKKVRIDGFRKGKVPMKIVQQRYGASVLQDVLGDLMQRNFINAIIENKINPAGAPSYKPEQFKDGDDFVYAVEFEVYPEIELKGLEEIEVEKPVVEVKDADVDTMLETLRKQQADWKETDEAAAAEDRVTVDFNGSVDGEEFEGGKATDFVLAMGQGRMIPGFEEGVVGHKAGDEFTIDVTFPEDYHAENLKGKAAKFAINLKKVEQRELPELTEEFIKRFGITEATVDGLRAEVRKNMERELKNAVRNRIKTQVLDGLVKANEIDVPAAAIDGEVDVLRRQAAQRFGGNEAQALELPRELFEEQAKRRVVVGLLLGEVISSNELKVDDERVNALIEEMASAYEDPKEVVEYYSKNKEMMNNIRNVALEEQAAELVLSKAKVSEKETGFNDLKNQNQMA

SEQ ID NO: 5371 - protein, 189 aa, Xenorhabdus sp.
MKRHILTLTAVAAALVSASASAEYQWGFANVSMNYLDWSKHTTHKTGQSSHKDDFAYMELEGGAGFSWGELYGFFDLENPFNSKTAQPGDNLRYAFKTTGRYYLGETGFNLYGHVYGSYSLPGNGGNFHEVNTLYGLGYNTTVAGLWFKPFVALNYTDNKFYSGNNGYVVGWVAGYDFNLWALEHMARA

SEQ ID NO: 5372 - protein, 478 aa, Xenorhabdus sp.
TAGTLQAWMTVEDVDIKTIGFFTLVGQAYVFKFLWAPAMDRYSPSFLGRRRGWMLVTQLLLIISIAGMGFLNPSQHLWWLAALAVAVAFFSASQDIIFDAYKTDLLQQEERGAGAAISVLGYRLAMLVSGGLALWVTTYIGWNSMYWLMAGQILIGVYDTLTGKEPQIDTAPPKTLHQAVVEPLFDFFSRNNAWLILLLIVMYKLADAFALSLSTPFLIRGVGFNPAEVGMINKTLGLAATIVGALYGGYLMQKWSLFRALMIFGVLQTISNFGYWILAVTPKDIYVMGGAIFLENICGGMGTAAFVALLMTLCNKSFSATQFALLSALSAVGRVYVGPVAGWFAEAHGWPMFYLFSIVIGFPGLALLLVCRSTLAYTQKTDSFIPRTLFSNYYRLAFLTMTLAALIFAAWLIINSLLFVITHIVTLVLYISPKYIDLFNNTSDFIYPMLSWSVVIGVIGLLLGGILDYIALKKSKFA

SEQ ID NO: 5373 - protein, 199 aa, Xenorhabdus sp.
NETIYMLKKILIPFALLFLANLTGCATPSNTLAIQPKIALPSADPTMKAITISISGVDQRQSQALAQVNRDAKLVTLLPSRDLRFLLQEALEKQMVARGYMIGSPANANLQVVVNQLYANVKEGSLRHDISAKAEISVIVYAQDGNKQIKNYRTSYNVQAPLSATNAKIADAVNTVLSDVIADMAQDSSISTFIKQNVR

SEQ ID NO: 5374 - protein, 445 aa, Xenorhabdus sp.
MSNRKYFGTDGIRGKVGNSPITPDFVLKLGWAAGKVLARHGSRKIIIGKDTRISGYMLESALEAGLAAAGLSASFTGPMPTPAVAYLTRTFRAEAGIVISASHNPYYDNGIKFFSIDGTKLPDDVEEAIEAEMEKPLTCVESAELGRANRIVDAAGRYIEFCKGTFPSEQSLNGLKIVLDCANGATYHIAPNVLRELGAEVIAIGCEPNGININEECGATDVRLLQKRVLEEQADVGLAFDGDGDRIIMVDHLGHKVDGDQILYIIAREALRQGQLRGGAIGTLMSNMGLELALKQLGIPFERAKVGDRYVLEKLQEKGWRLGAENSGHIILLDKTTTGDGVVAGLQVLSAMVRNDMTLHDLCSGMKLLPQVLVNVRFAGNNDPLQSEQVLEVVKEVENELNGRGRVLLRKSGTEPLIRVMVEGEDEEQVTALAHRIADSVKGMS

SEQ ID NO: 5375 - protein, 285 aa, Xenorhabdus sp.
MKLTARGSILDLSHPQVMGILNVTPDSFSDGGTHNTLDTALRHAVSMIEEGATIIDVGGESTRPGADEVSEQEELDRVVPVIEALSRRFDVWISVDTSKAIVIQEAAKAGAHIINDIRSLQEPNALEEAAKTGLPVCLMHMQGQPRTMQAEPHYTDVIAEVKAFLEAQIERCIAAGIAKDNLIIDPGFGFGKNLSHNYQLLAQLKTFHHLGVPILAGMSRKSMIGQLLHVPPQERITGSVACAVIAAMQGAQIIRVHDVKETVQAMQIVQATLSEKNTLSATGNL

SEQ ID NO: 5376 - protein, 643 aa, Xenorhabdus sp.
LSDMAKNLILWLVIAVVLMLLFQSFGPGDSSGRRVDYSNFISELSQNQISEVRISGRDIDFTKKDNGGKYSTYMPVPDEKLLDTLLNKQVKVVGEPPEQQGLLASIFISWFPMLLLIGVWIFFMRQMQGGGGKGAMSFGKSKARMLTEDQIKTTFADVAGCDEAKEEVGELVEYLREPGRFQKLGGKIPKGILMVGPPGTGKTLLAKAIAGEAKVPFFTISGSDFVEMFVGVGASRVRDMFEQAKKAAPCIIFIDEIDAVGRQRGAGLGGGHDEREQTLNQMLVEMDGFEGNEGIIVIAATNRPDVLDPALLRPGRFDRQVVVGLPDVRGREQILKVHMRRIPLDTDIDASIIARGTPGFSGADLANLVNEAALFAARGNKRVVSMVEFEKAKDKIMMGAERRSMVMTEEQKESTAYHEAGHAIIGRLVPEHDPVHKVTIIPRGRALGVTFFLPEGDQISASRQKLESQISTLYGGRLAEEIIYGPENVSTGASNDIKVATSIARNMVTQWGFSEKLGPLLYAEEEGEVFLGRSVAKAKHMSEDTARLIDQEVKVLVDRNYQRARQILMDNLDILHSMKDALMKYETIDAPQIDDLMNRTTVRPPAGWEGDNRNGGNSNNSNNRQDTSSQQQSAKPADGNPTA

SEQ ID NO: 5377 - protein, 127 aa, Xenorhabdus sp.
KGRCLCGAVEVKTNDPIDTINACHCKTCQNWGGGPFLSVECKNNLQITGDENIATYPSSEWAERAFCKKCGTHLFYHLHHPSTYYVPVALFENSDSGKLSNQVFIDSKPSYYNFVEKTPMLTKQDIL

SEQ ID NO: 5378 - protein, 199 aa, Xenorhabdus sp.
IMRIIAIRHAETQWNIERILQGRLDSPVTENGFRQINSLLSAIKDFPISKVISSSSGRACTTGQVLADYFGCRMEINENLCEQNFGILEGLPFGQADYHYPNITSRLFAGDPTVTIPEGESTIEVAQRAISCIQNLATNNSNATICLVTHGRTLQSLLWQLKGGNLQEETTRYSHQNCSYSVIDVKNERIHVVRWGVAT

SEQ ID NO: 5379 - protein, 610 aa, Xenorhabdus sp.
VAEQFDSKTFLKTVTSQPGVYRMYDATGTVIYVGKAKDLKKRLSSYFRVQVSSRKTESLVKNIAQIDVTITHTETEALLLEHNYIKLYQPRYNVLLRDDKSYPYIFLSGDTHPRLTLYRGAKHAKGEYFGPFPNSHAVRDALALLQKLFPIRQCENSVYRNRSRPCLQYQIGRCLAPCVEGFVTDEEYQQQVEYVRLFLSGKDQQVLSELVKRMENASKQLHFEDAARYRDQIQAVRQVTERQSVSGEVDDLDAISVAFEAGMACVHVLFIRQGKILGSRSYYPKIPTDTTLDEVVQTFLGQFYLQGSQNRTLPTAILLDFSLPEKALLEDSLSELSGRKVHIQPRPRGDRARYLKLARTNAATALTTKLSQQSTIHQRLTALAEFAGIGKIRRMECFDISHTMGDQTVASCVVFDSNGPLRSEYRRYNISGITAGDDYAAMNQVLRRRYSKAIDSAKIPDIIFIDGGKGQLKQAIEVFHSLDVEWDKGHPKLIGVAKGSDRKAGLETLFFSIEDEGIALPPDSPALHVIQHIRDESHNHAITGHRQRREKAKKTSTLESIEGIGPKRRQMLLKYMGGLQPLRNASVEEIAKVPSISYSLAEKIYNALKH

SEQ ID NO: 5380 - protein, 213 aa, Xenorhabdus sp.
LINVLLVDDHELVRIGVKGILDDVRGIKVIGEAGSGEDAIKWCRSNSTDVVMMDMGMPGIGGLEAAKKIIRYSPDTRIIMLTIHTESSLPTKVMQAGVRGYLSKAATPQDMINAIRSVYAGQRYISPDIAQQMALDQLSPQKENPLDDLSERELQIMTMITQGKKVNEISTLLNLSPKTVNSYRYRMFNKLNIKGDVELTHIAIRCGLLDAPI

SEQ ID NO: 5381 - protein, 259 aa, Xenorhabdus sp.
NEYSPYFINLSQVFNPEIRIFCFPYAGGSNSTFVPFARKITENVEFLVSQPPGKGARFKEKPYDNMQNLVEDIYTNIKPLLDKPYIFLGHSLGSRVAFELLRKIAAESLPLPIEFIASGSRGPQVSAIRKPISSLNDKEFAIALKDFGRVNQQILENDELLSLILPAIKADFKISEEYYYIGTESFACPLTVFGGTDDPLVAEHELYSWFDLFEQDKNVILFQGRHFFIDDNHDLVIDALTKIIHSKISKRPFKTLSGN

SEQ ID NO: 5382 - protein, 348 aa, Xenorhabdus sp.
MYKTDELRTRPIDKLITPKTLSEQYPISEKIRQNVTLSRKRIEDILTGKDQRLLVIIGPCSIHDTDAALDYASRLQVLREKYQHSLEIVMRTYFEKPRTVIGWKGLISDPMLDGSCQVNKGISLARNLLININELGMPTATEFLDMVTGQYIADLISWGAIGARTTESQIHREMASALSCPVGFKNGTDGNTHIAIDAIRAASARHMFLSPDKDGQMTIYQTSGNPYGHVIMRGGKKPNYYAEDITATCQKLREFRLPERLIIDCSHSNCQKIHRRQLDVARDISQQLNSGSTAIAGVMAESFLVEGSQKIMLGEPLTYGQSITDSCLSWQDTEEFLHILAEAAKKRC

SEQ ID NO: 5383 - protein, 681 aa, Xenorhabdus sp.
MSRIQPPNLKLSALSIIILTGLSSAHAATISADKKDTAEKSKHKDTITVYATGNQRDSFEAPMMVTVVEGNSASSKVAGNANDLLRKIPGINAADYGRANGQDISLRGYSQKGVLMLVDGVRQGTDTGHINGVFLDPALIKQVEIVRGPSALLYGSGALGGVIAYQTVDAADLLQDGQNSGFRVFSRAGTGDHSWGLGAAAFGKTENLDGLLTFSTRDVGNIHYGGGVKGRNDENIGNVMAKGTWKIDDIQSIGGELRYYHNKAHEPKDPQDINDHSRNVLADRTTAQRDMQLTYKLNPSSYNWLDLRNDIYYSDIAINTKTKEKGFEGRRQETFGIKLENRSHLSAMPFAAHQFTYGTEVYKQKQKPSRDNLNGFPKADIRFASGWVQDEITIRDLPVSVVVGTRYDNYKASNDNKNNKYKDISADKWSSKGAISITPTDWSMLFASYSQAFRSPTMGEMYDDSQHFPGNNWKPNPNLRPESNETQEYGFGLRFDDLLIYNDRLKFKASYFDTKAKDYISRAVNGKFTESINIPKAKIWGWDVSMNYGTDWFSWDLAYNRTTGKDEQTGKSIEALSPDTVTSTLDIPLSDTGFSVGWVGKFTQRTHFRGVNGDKDEYRKTIPQYAGYGVNDFYISYHGENQLKGVTTSVVLGNAFDKQYYSTLGAPQSGRNAKLLISYQW

SEQ ID NO: 5384 - protein, 253 aa, Xenorhabdus sp.
VNQSLYERYQQAKADNKAKYARDLAAYLNVSEGELLHSRVGIDAKRLNVDAPTLLQELATVGETKAITRNDFAVHEQVGRYENTKFSEHVGLILNPRELDLRVFFDHWSSVFYLVEPAKNGLRHSVQFFDRQGDALHKVYTTANTDMAAWEALIEKYQTEENPALEVQPAKVPEHAEMTEQLKVQLDEEWRAMTDVHQFFIMMSRHNLNRQQIFNSVKDDLAYRVDNSALTQILEVAHKDQNKIMIFRAHGTR

SEQ ID NO: 5385 - protein, 466 aa, Xenorhabdus sp.
MSNNGLTPCNVLWYNQLGMNDVNRVGGKNASLGEMITNLADLGVSVPNGFATTAQAFNDFLEQSGVNQRIYQLLDEIDVDDVNQLAKAGAQIRQWVIDTPFTAQLEKDIREAYLQLSEGEPDASFAVRSSATAEDMPDASFAGQQETFLNVQGIDAVMVAIKHVFASLFNDRAISYRVHQGYDHRGVALSAGVQRMVRSDLASSGVMFTIDTESGFDQVVFITSAYGLGEMVVQGAVNPDEFYVHKPTLKNNRPAIVRRNLGSKKIRMVYADSKEHGQQVRTEDVSEALRNCFSLADNEVEELAKQALLIEKHYGRPMDIEWAKDGHNGRLYIVQARPETVRSNQQVMERYQLNEQGSVLVEGRAIGHKIGIGTVKVIHNLSEMDRIQVGDVLVTDMTDPDWEPIMKKATAIVTNRGGRTCHAAIIARELGIPAVVGCGDATERLKEGELVTVFCAKRDTGFCLSE

SEQ ID NO: 5386 - protein, 720 aa, Xenorhabdus sp.
VKKHATTLKQGKALLGQGQQIAQMAKQAKSLLTGAGGSTAAGAGSLISGGGFAGGAGQKAGMAAQTAMGNSTAGKLLQQAGQVLGLLGGADPSGLLFTLTAGRLPAQTFVVTDFSLNEHFSHPFALEVGLASTIPAISFPLVLDRTATLTILQNGIEQRSITGIVTRFEQGNAGLHQTTYRMSIRPDLWRTTLRQNSRIFQQLNIANIITTILKEHSIRDVVFNLRHPHPEREFCVQYQESDFDFLQRLTAEEGIFYFFECSNGRNTLVFADDCGSVPPGIHLPYQPGEVSTLGEPSVSSLTSSAQVRPAQVQLKDYTFKNPAWPAEFQQQMRDENLQQLYYEHYDYPGRFKDEAHGKDFTRYRLEALRSDAETGQGSGNAIALQPGKLFILDNHPRLDLNQSWQTVSASHSGSQPQALETTSSGSGTTLNSHFTFIRQNQNWRPAPRPKPVIDGPQIAKVVGPAGEEIFCDQYGRVRLQFPWDRYGKSDDQSSCWIRVSQPWAGQGWGMLAIPRIGQEVVVDFLHGDPDQPIVTGRTYHASNIPPGSLPGSKTQMAFRSKTHKGQGYNELLFEDAKGSERLDLHAQKDMNTKVLNNRDTHVLANHSETVEKNQTIKVNEHKNEMVKMTSTETIGLVYALTVGTSMNTTVGASQTEQVGSHKSIAVGNTLSINAGDVIELKCGASVLRMDSSGKITIQGSEFKFEASGPVQITGKDIDLN

SEQ ID NO: 5387 - protein, 395 aa, Xenorhabdus sp.
VMNYSMLDVDDTEHHVAVMKIGYQLMPAGQGEYVAELLPAPPLCLQDEYRGQMNASQVLQESDLAPFKPRCDVIVNGTAYAPDYRPCTEFPVRLQVKTPQGHSLLDKTLTITGEREFIRDASGHWQLTEPKPFTTLPLDYRYAFGGECKIQADDKASKLLNERDRLTVEQRQQHPDGENAPMAHAVCETNPLGTGFITPWYASAKKLIRYPAPRIIRSDAPFTVEHFTAQLAGALPPDTPACQPQGMGFIGRPWLPRRQLAGTYDADWLEHRHPYLPKDFDFGYWNGAPADQQIDWPDTDIAITLSGLTPHSDLHVNLPGHRPFILLRMQNGILLPVPMRLDTLIIDSEARTLHLTCRLNFKASLPIRVAEARFEINPDAPLLKLAPQDEEKTNG

SEQ ID NO: 5388 - protein, 67 aa, Xenorhabdus sp.
VRANGMPVVVFARSFVPTTLGDQPGVANGVKSGTVGGKCHPLEHTRTVRAGNKLVLRHGDKFWMNGA

SEQ ID NO: 5389 - protein, 86 aa, Xenorhabdus sp.
VTPADKKVMLDYDKKLADKVEEKFKNGEYPLKEWEQKEEKQEEDSHPKPNIALPQKPRDDSPTGEGNTLGSIVGQAGVSQNAPHEA

SEQ ID NO: 5390 - protein, 34 aa, Xenorhabdus sp.
VAQVEHDIADAVLFEDCGDDIGDVELLEDARVLS

SEQ ID NO: 5391 - protein, 246 aa, Xenorhabdus sp.
LTGKVAFISGGTKGIGKGIAQVFKRVGAITIISGTDKTKGMPVAEELGVDFIALDVTDPSACKNVINEIVEKYGRLDILCSNAGIFPQHNIKDMTVEDWDLVYSVNLKGTFLLTQAALNVMEKQQYGRIVITSSITGEIVGMQGYSHYGASKAGQLGFMRSAALEYAKQGITINSIMPGMIMTEGLMAFGEDNLKQIETVIPMGALGSPEDIGYTACFLASDEAKNITGQTIVVDGGQVLPEVQGY

SEQ ID NO: 5392 - protein, 222 aa, Xenorhabdus sp.
MSLNYERKQLPLPNGHSKMLLHSCCAPCSGEVMEAMLASGIDFTIFFYNPNIHPQKEYELRKEENIRFAEQMGIPFIDADYDRDNWFERAKGMENEPERGIRCTMCFDMRFERTALYAHEHGFPVITSSLGISRWKNMQQINDCGVRAASRYPGLTYWEYNWRKGGGSARMIEISKREEFYQQEYCGCVYSLRDTNRHRLATGRERIKLGTVFYSADSVQKN

SEQ ID NO: 5393 - protein, 224 aa, Xenorhabdus sp.
MEKYRFSDNAFLYSLWLAWAITLGLYVYGNNIGCTITAILSFLALGFYFTNMKQRMKAMFGKKTEASAASPVTQITPPVQTEEKKISGTEARANTIVAKNSVFKGDIEMEGDIQIWGKIIGNIRVKGGAIRVMHAGKVEGELIAPEIIIDGHVEGTCCAETLDILEHGELRGISRCGSMSIRRGGLFIGQSEQVEKENKKKQEAERIVSIKDTPGDKAKSKTTA

SEQ ID NO: 5394 - protein, 496 aa, Xenorhabdus sp.
SNVVTWRQYGERCERVAVALQQMGIGKGCVVSALLPNIHELLELHYAVPLSGGILNALSIRTDAATLNFIFEKINPTILIIDKNYLALLDGVSFKNPVKIVVITENNTPLPESALDLISYESLISEYPSETLNFYPIDEQEAISINSTSGTSGTPKLVVYSHRGAYLNAISNILDWDMPKYPIYLWTLPMFHCNGRCFPWTIAARAGTHVCIRKFDAQKAIQIMLKHQVTHYCGAPIVHYSLGREAQKLGISFNNNVYGLIAGAPPTEKMFSLLDAAGIRATHVYGLTETYGPVVVCEDKPDWATLPKSETILKKMRQGIVSNLQGEISVIDENNGLAVPFDGQSIGEIAIRGNIVAAYGPVDRVTFDMTSQWFFTGDLAVIDSDGYIKIIDRKKDIIISGGENISSLELENALSSYPGVLAVAVVAKPDEYWGEVPHAFIEIDDNTSITEQELDDYLRTIVARYKRPKGYTFSALPRNASGKILKETLRKLANNL

SEQ ID NO: 5395 - protein, 1412 aa, Xenorhabdus sp.
HNAPHEANPSVTVEAEPEQTAWETTKKIGKAIGNMAADKAKQTGQDLSTLEGWNPIEQQKGFAKAASNAAVDTAEGYIKGAKLETSHDIEQQARLLELFGGEKYTKNVEIMRDAAKENRKNTQEFNLDNLKMSMDTPGQRLGELGFEIVSLFGLPASKASKSAKAIDEISTLEKVIQAENRVIKNKTGINNTTGTQGKTSNLETPNTSEVSNPSGATIQGKKKTDNSDTSPTSNAKNSEQDGVNNQSNNKEGSCTGTCKTEGEPVDMATGDFLQVWPIIAIPGLLPITLTRTYRSTAKYSGLFGPKWADDWSRQLMLTTGKVNFSDADGVIYDYNTPENQVLARNQHIPHYILTGELTGELQLTDRQSQLTYHFNHAIGSIRKLSAITDRRQNAIQFIYDKQSQLIEVTRTDGFRLILDYQDQQLQTLDYLEQKKQQRLVTCHYGPQGYLSECEAFQHNHLWHEYDALGRMIRWHDTDQTDLILTYDEQGRVLSTTSSSGYWCDRFHYDDNARITTYIDAEGGETQYHYDNNCLVIREVDPLGRITRRQWRNSQIVWEADPSGAITTFDYNPDGGLTEVKLPTGDTFYYGYDEHGQLIESILPTGDRWQFHYDEQGNLTALTNPLGHKEEYQYGIHGELRQRLLPDGRQWHYAYDAQQRLAAVMTPDSQTTGLQLDELGRLRQLTDALKQQTHYRYSDDHASLNGSLTEVELPDGTTQQLTYDSERRVVAVTDGEGRTTRYTYGAFDLLNQVTRPDGTVLRFGYDRLTRLNSVTASTGETYRYERDAAGQIIRETDFTGRTITYQYDKLGRRIQSQYPDGQQLRWHYSAAGSLIKQESWQPEDGKLVLKATTTYEYNKRYQLVKATNADAVVEYEYDKTTGLPICERINGREITREWDSLTGRPVSESVDGNTLHFGYNLSGSLNHFQLNQHAPLTFQHDALGRETVRESANGFILASRYTATGLLAHQSAGQATQFFRETLAQNDPHFPPQATAVNRSWQYDRAHNVRVIDDSRWGQTRYCYNSNDQILHTLFEGVRPHEEQFSYDANGNLSQHLPTDAQGAVAQINQRQQAGRVVQQGDIRYRYDDNGRLIEKTEQRDGFRPQVWRYRWDTQNQLTHCETPDGSRWQYKYDPFGRRLQKLRIHDGKLAATNLQLWLAGKPDIEPRADAIIGQDYLWSGDQLIEETPIYADGTLAEEQRIRWLYEPGSLTPSARFEKCKLHYIVSDHQGTPREMLNEEGQLIWAQRLRTWGQVDRFQVIASNNPDYHVNCNLRFSGQYEDEESGLYYNRYRYYSPETGQYISPDPIGLAGGVNPYGYVHNPTNFIDPFGLAKCPLPPKKINLTKDGIQHVKDRHVGNVAGWSHKSKWTLNNADVKSTIRDVFRNPDRITRDGDRFIYEKVMKRDVGITPER

SEQ ID NO: 5396 - protein, 244 aa, Xenorhabdus sp.
MNAKTPDSHTQSHANVDQQEIEKFEAVASRWWDLDGEFKPLHRINPLRLNYILQRAEGLFGKKVLDVGCGGGILSESMAREGADVTGLDMGFEPLQVARLHALESGMSVTYVQETVESHAEQHPHAYDVVTCMEMLEHVPDPGSAIRACAKLVRPGGHVFFSTINRNRKAWLIAVIGAEYILNMVPKGTHDAKKFIRPSELIGWLDKTSLKDQHIIGLHYNPLTDKFRLGHNVDVNYMLHTQSA

SEQ ID NO: 5397 - protein, 614 aa, Xenorhabdus sp.
LFRVLGFMLWALGALLTTFYLTNIFNKGKSDIRQDYNTVYDIMFSYIRNTTGTLHDLQYMTEKYLSQKNEKKLTINLPHNNSHFLYTPLSIHSNCDFLSNEQDHYLKSLNELFFFWKDNIVMPQGINQVFLVDIQSMCMMNSPIRGTITDPDILKKMVYENYRRLIFDQEKGKNQNIYWAAPNTSSDSGSFYILSPIYSNGQMIAMIGVEQSIRLDTFIPDHDRNITLTLLNNYNKPELYYPARNSNKSDTIGYNTQVPYFGYSENFSHLILKRRLAPSSFSVVYSEPLVNIFNAFKHKIINSIILNITSAILIIFFVWLFERKMFSPAENNALRLEENEQFNHRIVASAPVGISILRISDGANILSNELAHNYTRMLTFEDQKRIIDIICDKSSSYIDVVTSNNNHLQISFVHSRYRNEEVAICVLIDISTRAKMEKSLQEMASAAKQANQAKSMFLATVSHELRTPLYGIIGNLELLQSYPLSREAARLLSTMNNSSSLLLKIISDILDFSKIESNQLKIDAKEFSCKEVVSHVISNYLPLIAKKNLGFYCYIEPDVPDYINNDPVRLQQIISNLLNNAIKFTETGCIVISIAIRHGYMYICIKNTGLGIEK

SEQ ID NO: 5398 - protein, 880 aa, Xenorhabdus sp.
MSDIAREITPVNIEEELKSSYLDYAMSVIVGRALPDVRDGLKPVHRRVLFAMNVLGNDWNKPYKKSARVVGDVIGKYHPHGDTAVYDTIVRLAQPFSMRYMLVDGQGNFGSVDGDSAAAMRYTEVRMSKIAHELLADLEKETVDFVPNYDGTEQIPDVMPTRIPNLLVNGSSGIAVGMATNIPPHNLSEVIDGCLAYIDDENISIEGLMEYIPGPDFPTAAIINGRRGIQEAYRTGRGKVYIRARAEVETDEKNGRETIIVNEIPYQVNKARLIEKIAELVKDKRIEGISALRDESDKDGMRIVIEVKRDAVGEVVLNNLYSLTQLQVSFGINMVALHQGQPKLLNLKEILSAFVSHRREVVTRRTIFELRKARDRAHILEALAIALANIDPVIELIRRAPTPAEAKANLISQAWELGNVAAMLAQAGDDAARPEWLEPEFGIRDGKYYLTEQQAQAILDLRLQKLTGLEHEKLLDEYRELLIVIAELMFILESPERLLEVIREELLAIKEQYNDKRRTELTENSADINIEDLINQEDVVVTLSHQGYVKYQPLSDYEAQRRGGKGKSAARIKEEDFIERLLVANTHDTILCFSNKGKMYWLKVYQLPEASRGARGRPIVNLLPLGQDERITAILPVREYEEGLNIFMATASGVVKKTKLSEFSRPRSAGIIAVNLNEGDELIGVDLTDGSNEVMLFSAQGKVVRFLEEEEETLEDGTVRVKGVRAMGRTATGVRGIKLAEGDKVVSLIIPRGEGQILTVTENGYGKRTAEKEYPTKSRATQGVISIKVSERNGNVIGAIQVEPTDQIMMITDAGTLVRTRVSEVSTVGRNTQGVTLIRTAEDEKVVGLQRVAEPDDDEDEDGNIVTPSDEEGNGAENQE

SEQ ID NO: 5399 - protein, 251 aa, Xenorhabdus sp.
TETKVLLPDGASPHDYALRPSDIRKLDQADLVVWIGPDMETFLAKPIEKIAQNKQLELADLPTIKPLLLKNSENKHDSVESNQHKHETDHEHHHHGQYNMHIWLSPNIAQKAAQAIYTRLVERYPQHKQQLEVNLRKFNGQLVQTDKNITDMLKPALGKGYFVFHDAYGYFEKHYKLTPLGVFTVNPEIQPGAQRLHNIRTQLVEQKAKCIFAEPQFRPAVIHAVAKSTDVRIGTLDPLGSGIVLNKDSYM

SEQ ID NO: 5400 - protein, 41 aa, Xenorhabdus sp.
VTTKYAYYIGHGDDVRDLFHVYADSIQLNHVYFRYFSVIRV

SEQ ID NO: 5401 - protein, 66 aa, Xenorhabdus sp.
MRFASQPVMGMDMALATPNEVITHVPWEFDAPKFPAIVGMATLAMVESKTSIKVAIAREMVTNASL

SEQ ID NO: 5402 - protein, 529 aa, Xenorhabdus sp.
MQQLRPIRRALLSVSDKAGIVEFAKALSNRGVELLSTGGTARLLAEAGLNVTEVSDHTGFPEMMDGRVKTLHPKVHGGILGRRGQDDAVMEQHQIAPIDMVVVNLYPFAQTVAKPDCSLEDAVENIDIGGPTMVRSAAKNHKDVAIVVNAQDYNKIIEEMDNHQNSLTQPTRFDLAIKAFEHTAAYDSMIANYFGKLVPAYHGDNNKPSGKFPRTLNLNFIKKQDMRYGENSHQDAAFYIEEKITEASVATATQLQGKALSYNNIADTDAALECVKTFAEPACVIVKHANPCGVAIGADIRTAYDRAFKTDPTSAFGGIIAFNRELDADTAKIIIERQFVEVIIAPSINKEALPILATKQNVRVLSCGEWNSAAASLDFKRVNGGLLVQDRDLGMVTEAELQVVSKRQPTEQEMQDALFCWKVAKFVKSNAIVYAKDNMTIGIGAGQMSRVYSAKIAGIKAGDEGLEVQGCAMASDAFFPFRDGIDAAASVGVTCVIQPGGSIRDDEVISAADEHGIAMIFTGMRHFRH

SEQ ID NO: 5403 - protein, 427 aa, Xenorhabdus sp.
MNILIIGSGGREHALAWKAAQSPLAERVYVAPGNAGTALEPNLKNVDIAATDIEGLLAFAQSHHIDLTIVGPETPLVIGVVDAFQQAGLTIFGPTKAAAQLEGSKAFTKDFLARHHIPTAAYQNFTEIDPALAYLEKTGAPVVIKADGLAAGKGVVVAMTIEEAQNAVKDMLAGNAFGDAGHRIVIEEFLDGEEASFIVMVDGKNVVPMATSQDHKRVGDGDTGPNTGGMGAYSPAPVVTDEVHQRVMEKVIYPTIKGMAAEGNTYVGFLYAGLMIDKQGEPKVIEFNCRFGDPETQPIMMRLRSDLVELCLAGAKGQLDGKTSEWDNRSALGIVLAANGYPADYSKGDIISGLNQEQQADEKVFHAGTALKDKDVVTAGGRVLCVTALGDNIAEAQTKAYLRAEKINWKGCFYRKDIGYRAIARLK

SEQ ID NO: 5404 - protein, 226 aa, Xenorhabdus sp.
EGKSTPLLLMIQGLLALGLISLLSACSVKPKEPTFSASGFITDGGVIRLWRLNDQNSKPQVIMSVYSPYQYKNTTVTFYEYRQGHLWQMCRNVFNDNPTEEILRLDKNDNVVFMQREFDGHREQLSNDDIIRSLFEASRIKETSDVLITGKVKLMQGHWQNGEVTTCSGDKISIEFDPQSQAWLEERSKNSYGILTIAWLESPEGKQLLLVANDDFCLWEPTKDKL

SEQ ID NO: 5405 - protein, 90 aa, Xenorhabdus sp.
MNKTELVDAIAAGADLTKTQAKAALESTLAAITESLKSGDAVQLVGFGTFKVNHRAERTGRNPQTGKEIKIAAANVPAFSAGKALKDAVK

SEQ ID NO: 5406 - protein, 74 aa, Xenorhabdus sp.
RPMLSDPVWDKLFVFMQQNRLTYHKKTHRLIMEGILFRMRTGIPWRELPAEYGKWNTVFKRFNVWSKKRVFNSL

SEQ ID NO: 5407 - protein, 146 aa, Xenorhabdus sp.
MLSVYAENVERLEGENKTLSATVGSLEKHFTKGITLPAFCKGLNGVNTAKIMWWAMERNWLYNEQKDPEKKPRWRVASYARDRYLTEDENEIKPHGQDPFITRTAVLLEKGCHRLYALYMKGELPMKKSWNGEYQHDKAVYTLEVK

SEQ ID NO: 5408 - protein, 183 aa, Xenorhabdus sp.
VIVITEAANTEIIGYVDALKSLDAGQYDRDLLLGFDLVLAILHGWKAGFYEPTSEQSVMLWRWIVSASFIREQMDRNGTREVDNDEGGTDTAAIYLNGASAITVYPFSERLMLAAHIEGIAFEQFGREAGADMAIRMYMDFINIQPESGNWLSEKGREGLSMLHDDLIKSVEAGEFGDIPVIH

SEQ ID NO: 5409 - protein, 91 aa, Xenorhabdus sp.
VTRNGGAHFTMQVGKTEINVAIVEGVKGIRELVDSYALEALQQSYPAWEVIAIALMEKCVANGGLTIYGREIWQSMINDIGNTLAAKGMFQ

SEQ ID NO: 5410 - protein, 58 aa, Xenorhabdus sp.
VRNGTLQAIWALATDSKGILCYLHRTYLDGDRKADITPQKKLDAMQEENYRTYAQSVL

SEQ ID NO: 5411 - protein, 62 aa, Xenorhabdus sp.
VVMLAFNKARFVSVEIVRDLLGCGTIPRSYAIGKAAFVLMTVKAEARSFVPATPGMAGSYSP

SEQ ID NO: 5412 - protein, 371 aa, Xenorhabdus sp.
MIYAAQIVDEALEQGITLFVVNNRLQYETSRDSIPTELLNKWKQHKQELIDFLNQLNSEEQTQASHFLQDIQRTEKAKHYPLSFSQQRLWFIDQLAGGSLQYNCIFDFRMREAISIKAFENTVKSLLERHEVLRTYFEIINNEPRQFIAADYDIPITYYDLSALSEAEKNDQIKQFSKEEENQLFDLSTDLMLRLRLIKLAEDDYLIIYTVHHIAFDGWSASIFLSEFFTLYRAYCQGKANPLLPLKIQYTDYVQWQQSWLQGNVLEKQLTYWQNQLAGISPVHNIPLDNPRTGKQNIGGRFHIQHISSHLTQAIRGLCAKHNVTLFMFLETAFAVLLSRYSNEKDIVIGTGLAGRRHYDIEPLIGFFVNS

SEQ ID NO: 5413 - protein, 45 aa, Xenorhabdus sp.
MSNQITTSGNNNYLAIQIALSGFLALVVAMGIGRFTFTPQDPFRA

SEQ ID NO: 5414 - protein, 256 aa, Xenorhabdus sp.
MIKEMTSELTDKEMLRYNRQIVLRGFDFDGQEKLKSSNVLIVGLGGLGCAASQYLAAAGVGTITLLDFDTVSLSNLQRQILHRDERIGMAKVHSAALTLREINPHITVRPVEGLLDDPALSQLIIQHDVVLDCTDNVAIREQLNRLCYQHKTALVSGAAIRMEGQLSVFTYHEEEPCYRCLSRLFGENSLTCVEAGVMAPLVGTIGSLQAMETIKLLTQYGKVARSRVLLFDAMTMQFREIKLVKDPRCEICQRSL

SEQ ID NO: 5415 - protein, 409 aa, Xenorhabdus sp.
YTSGLISLEQALEKLLSQTASLSETETICLMHSAGRITATDIISPINVPPFDNSAMDGYAIRLADLNETQTLPQAGKALAGVPFQGEWPAGTCIRIMTGAPIPTGTDAVVMQEHTETTETGIRFTHPVRQGQNIRTIGEDIAQNTAVLPQGTKLSTAQLPLLASLGIAKVEVFRKLKVAVFSTGDELQAIGKPLQSGQIYDTNRFAVRLMLEKLDCEVIDLGVIPDDPDALRHAFIQANDLADLVISSGGVSVGEADYTKQILDEMGQISFWKLAIKPGKPFAFGKLEKAWFCGLPGNPVSAVLTFYQLVQPLIAHLSGFSSWQPPLRLNAKVVTPLKKSPGRLDFQRGIAGLNEQGELEVKTTGHQGSHIFSSYSLGNCFIVLERERGSVAAGETVQIEFFNQLLKNQ

SEQ ID NO: 5416 - protein, 61 aa, Xenorhabdus sp.
ADQFGSLLLAASWLEDQAAEDEVQAQITLFDEYLLPWCGQFLGKVEAHAVSGFYRTLAMIT

SEQ ID NO: 5417 - protein, 512 aa, Xenorhabdus sp.
MNLLKSLAAVSSMTMFSRVLGFIRDAIIARIFGAGVATDAFFVAFKLPNLLRRIFAEGAFSQAFVPILAEYKNQQGDEATRTFIAYVSGMLTLILAIVTVIGIIAAPWVIYVTAPGFADTPDKFTLTRDLLRITFPYIFLISLASLAGAILNTWNRFSVPAFAPTLLNVSMIFFALFVAPYCNPPVMALGWAVVAGGILQLAYQLPHLKKIGMLVLPRVSFRDSGVWRVIRQMGPAILGVSVSQISLIINTIFASFLVSGSVSWMYYADRLMELPSGVLGVALGTILLPSLAKSFSSGNHDEYRKLMDWGLRLCFLLALPCAVALGILAEPLTVSLFQYGNFSAFDAAMTQRALIAYCFGLMGLIVVKVLAPGFYSRQDIKTPVKIAIATLILTQLMNLAFIGPLKHAGLALSIGLAACFNAVMLYWQLRKREIFKPLAGWGVFLLKLLVAIAVMVGVLLVMLWFMPNWEQGNMAMRLLRLMAVVVAGAGSYFAALALLGFRLKDFAHRGLQ

SEQ ID NO: 5418 - protein, 187 aa, Xenorhabdus sp.
MKKFLLGAALVLIGLLSGCGQFKDLSISESLLNDYLLKKVHYQKEIGIAGIANFNVSLGNLSSQIGRQDPEKIILTSKGKVEISTLFGSTQADMTLAIRAKPVFDAEKGAIFVKGLEIIDYQTTPEKVAGPIKALIPYLNTSLTEFFDTHPVYVLNPEKSKSEAAAAKFAKGLEIKPGKLVIGLTDK

SEQ ID NO: 5419 - protein, 402 aa, Xenorhabdus sp.
EMSLVSQARSLGKYFLLLDNLLVVLGFFVVFPLISIRFVEQMGWAAVIVGFALGTRQFVQQGLGIFGGAIADKFGAKPMIVCGMLLRALGFALMAIASEPWVLIFSCILSGLGGTLFDPPRAALVIKLTRPHERGRFYSLLLMQDSAGAVIGALIGSWLLQYNFNMVCWIGAGIFVLAAIANAWLLPAYRISTIRTPIKEGMTRVIKDRRFFYYVLTLTGYFILSVQVMLMFPIIIHEMSGSHTAVKWMYAIEAVISLTLLYPIARWSEKHFRMEQRLMIGLFLMSLCMFPIGWINQLHLLFALIALFYLGTVTAEPARETLSAGLADPRARGSYMGFSRLGLALGGVLGYTGGGWLYDTGHALNMPQLPWVLLGLIGLFTIYALHRQFNQKKIEPVTISRH

SEQ ID NO: 5420 - protein, 576 aa, Xenorhabdus sp.
VNIQAILSEKISSALIAAGAPADSEAHVRQSAKAQFGDYQANGVMAAAKKVGMPPRQLAEKVVNLLDLQGIASKIEIAGPGFINIFLDKEWVATNVENALSAEKLGVSPVEPQTIVIDYSAPNVAKQMHIGHIRSTIIGDAAARTLEFLGHKVIRANHLGDWGTQFGMLIAYLEKVQNENASDMALEDLEEFYRAAKKNYDEDEEFAIRARGYVVKLQGGDEYCRNMWRKLVEITMSQNQATYDRLNVTLTEKDVMGESLYNDMLPGIVADLKQRGIAVESDGATVVYLDEFKNKEGEPMGVIIQKKDGGYLYTTTDIACAKYRHEVLNADRVLYYIDSRQHQHLMQAWTIVRKAGYIPESMSLEHHMFGMMLGKDGKPFKTRAGGTVKLSDLLDEAIERADALIREKNPDMPEDELKKVIEAVGIGAVKYADLSKSRTTDYVFDWDNMLAFDGNTAPYMQYAYTRVSSIFKRAEIDESSLTLPVVLNEEREQTLATRLLQFEETITTVAREGTPHVMCAYLYDLAGLFSGFYEHCPILNAENAELRQSRLKLALLTAKTLKQGLDTLGIQTVERM

SEQ ID NO: 5421 - protein, 343 aa, Xenorhabdus sp.
LLQLFPGLILTAILTAAATYLSQFPLLINMGLSVLTISILMGIIVGNTLYPSLKPICGNGINFTKHYLLRAGIILYGFRLTFQQIADVGIAGILIDVIMLSSTFFIALWLGRVFFQIDSQTVMLIGAGSSICGAAAIMATEPVVKASADKVAVAISTVVIFGTLAIFIYPWFYQLNIYYQWFPFSQVEFGLFSGSTIHEVAQVVAVGHTQGNAAEDTAVISKMLRVMMLAPFLLLLSGYLSRVKSKNCVNDHGKSPITIPWFAIFFIVMAAFNSFHLLPELIVSSIIAIDTILLAMAMAALGLTTHISAIRQAGTKPILLAFLLFIWLMVGGLIINKGIHHLL

SEQ ID NO: 5422 - protein, 495 aa, Xenorhabdus sp.
MSQEQSVPQEQAPKNLRRELKARHMAMIAIGGSIGTGLFVASGATISQAGPGGALLSYALIGLMVYFLMTSLGELAAYMPVSGSFSTYGSKYVDEGFGFALGWNYWYNWAVTIAVDLVAAQLVMGYWFPDAPGWIWSALFLSLIFLLNFISVKSFGEAEYWFSLIKVSTVIVFIIVGILMIVGIMKGAEGAGWHNWTIGEAPFAGGFAAMIGVAMIVGFSFQGTELIGITAGESKDPAKNIPRAVRKVFWRILLFYVFAILIISLIIPYTDPSLLRNGVKDISVSPFTLVFENAGLLSAAAVMNAVILTAVLSAGNSGMYASTRMLFTLAREGKAPKIFGHLSKGGVPRNALYATTVVAGLCFLSSMFGNQTVYLWLLNTSGMTGFIAWLGIAISHYRFRKGYVAQGRNINELPYVSGFFPVGPIFAFVLCLLITLGQNYQAFLQDTIDWYGVTATYIGIPLFLLIWFGYKLKNKTRFVKYNEMDFPAIKHTYHE

SEQ ID NO: 5423 - protein, 33 aa, Xenorhabdus sp.
VKFALQTVVKGASISLLASSAMMTSFAWAGTVP

SEQ ID NO: 5424 - protein, 280 aa, Xenorhabdus sp.
MKFVGAHVSAAGGVDQAVIRAHELKATAFALFTKNQRQWNAPPLSTVVIDKFKADCERYGYGKGQILPHDSYLINLGHPESEGLEKSRAAFLDEMQRCEQLGIDLLNFHPGSHLKKIDIDKCLARIAESINIVLDQTQGVTAVIENTAGQGTNLGFKFEHLAAIIEGVEDKSRVGVCIDTCHAFAAGYDLRTEQNCDATFKAFDDIVGFEYLRAMHLNDAKSEFSSRVDRHHSLGEGNIGKIPFSYIMKDDRFNGIPLILETINPDIWDQENAWLKSQQS

SEQ ID NO: 5425 - protein, 25 aa, Xenorhabdus sp.
VKGASISLLASSAMMTSFAWAGTVP

SEQ ID NO: 5426 - protein, 82 aa, Xenorhabdus sp.
DWHQADIIAALRKRGTTLAAVSRESGLSSSTLANAFSRPWPKGEWIIADYLGIHPSEIWPSRYFDSHTGELLERKSRSKPQE

SEQ ID NO: 5427 - protein, 350 aa, Xenorhabdus sp.
MTTESYTIKIRRPDDWHVHFRDGDMLKTIVPHTSHFFGRAIVMPNLAPPVTDVASAKAYKDRIMAAIPSEHQFQPLMTCYLTDSTNSSQIEIGYKEGIFTACKLYPANATTNSSHGVSDIQKIYPLLATMEKLGMPLLIHGEVTAAHIDIFDREARFIEQVMEPLRKQFPELKVVFEHITTKEAAEYVLEGNDKLGATLTPQHLMFNRNHMLVGGIRPHLYCLPVLKRNIHQEALRAAVASGCDRFFLGTDSAPHLLHRKESSCGCAGVFNAPTALAAYATVFEEMNAMEHFEAFCSLNGPKFYDLPVNDGFIELTRKPTPVFEYVEHNGEKLIPFLSGEDAGWEVKICK

SEQ ID NO: 5428 - protein, 86 aa, Xenorhabdus sp.
MGQKDEIIQTHPVVGWDISIVDTYDAMMIRLHYLSSPDQTTKTDNVSIDKTLWLTTGVAKQLILILQAGIEKIESSEYDQLDYTKH

SEQ ID NO: 5429 - protein, 353 aa, Xenorhabdus sp.
MPVLHNRISNKELKERMLAETEPRTTISFYKYFAIPEPQDFRDSLYQQFTDLSVFGRVYIAKEGINAQISIPSKNVDALKAVLNTADPALYNLRLNIALEDDGKSFWVLRMKVRERIVADGIEDETFNPSETGEYLKADQVNQMLDDPETVFVDMRNHYEYEVGHFENAIEIPSDTFREQLPMAVEMLKDDKDKNIVMYCTGGIRCEKASAYMLHNGFNNVYHVEGGIIEYARKAKAQGLPVRFIGKNFVFDERMGERISEDVIAQCHQCGSTCDSHTNCKNDGCHLLFIQCPSCAVRFEGCCSDVCREEMLLPEGEQRARRAGRENGAKIFNKSRYRLNEGLNITSLQSIKQ

SEQ ID NO: 5430 - protein, 99 aa, Xenorhabdus sp.
VEQRLTILLQGGVIDQDIYDNMLDVVHILEEFWLIPVRHPQGEMALTHMASAFMRSRRGEIVSPIEKDILDKIKQSGNYSQLLKIHHSLLEKFTLTLHP

SEQ ID NO: 5431 - protein, 325 aa, Xenorhabdus sp.
SRAWRENDHWMVEAKDLVTGESKTWRAKGLVNATGPWVKNFFDNGLQLKSPYGIRLIKGSHIVVPRVHDEPQAYILQNEDNRIVFVIPWNDEFSIIGTTDVEYKGDPKDVKIDDQEIDYLLKVYNDHFKKQLNRTDVVWTYSGVRPLCDDESDSPQAITRDYTLDVQDEQGQTPLLSVFGGKLTTYRKLAEHAMDKLAQYYPNAGQAWTKNGKLPGGELEGQDRDGYARLLRQRYDWLPEGIARRYSRTYGSNSNIILGDAKELADLGEFFGYGLYEAELRYLVEHEWVTQLDDAIWRRTKLGMWLTDEQKQRVADWLAQNVKSA

SEQ ID NO: 5432 - protein, 169 aa, Xenorhabdus sp.
MLKIQQAVTEDNLLLSQMLEESYRFHFSQLWNDKDELEEYIAEESSPESIASSLNTPNHKWFIAETNRPIGFIKIAVNKTIPDSELTGLYLHKLYLLPHLTGQNYGQQLFDYVEKLGQEQGQKWLWLEVLESNKQARKFYEKNGMTWYRDIIFTSPKQQSTLHIMIKKI

SEQ ID NO: 5433 - protein, 301 aa, Xenorhabdus sp.
MSQTFIKKEGIAQSFLARYLLSEQCGNRLKTIELLAKECGLSVGLMQAALKSLEQSQAVGIKRRGRNGSFLSQINHKLLLEYADIGNVVCAMPLPYTRAYEGLASGLKALCAGVPFYFAHMRGSDIRIECLLNGVYDLAVTSRLAAEQHPDNKDIYIALSLGTQSYTDRHRLIFRQGEMETIRRVGLDSTSADQKIMTKQYFAGKEIELVEVSYHECLNQIMKGHIDAAIWNVGQGHELIAQGLMTQLPDDGECFIKASEAVILARKDNIPIQQLLHTMVDREALLTHQQNVVSGIIEPIY

SEQ ID NO: 5434 - protein, 38 aa, Xenorhabdus sp.
MFINALKKQNPKLIEVAKNLWQQGTILPDTYVIDVDQV

SEQ ID NO: 5435 - protein, 304 aa, Xenorhabdus sp.
MKVIANDVPIEIEDSGEGANGEKRPVVLLIMGLGMQLIDWPDDIVNLLVVAGFRVIRHDNRDAGLSQRFDHSPQRSLLWQKVRFRLGLPVRASYSMQDMADDALGVLDALNIPQAHIIGASMGGMIAQRLAATNPDRAKSLVSIMSSSGAHGLPLPKPEVMAALLSKPVDTSMEELVAHQLKIIRLIVSPSEPLNIDEQAQHLRMAFRRGGYYPKSFIRQILAIIADSDRAELLSRISCPALVVHGEDDPLIPMACGEDTARRISGAKFLPVQQMGHTFPPSFMQAMTEEIIPFLHDATNKEVD

SEQ ID NO: 5436 - protein, 334 aa, Xenorhabdus sp.
ALRAEHHSVRTDAGMFDVSHMTIVDLHGTGCRDFLRYLLANDVAKLTEKGKALYTGMLNASGGVIDDLIVYFFTNDFYRMVVNSATREKDLAWIKQHAEKYPVEITVRDDLALIAVQGPNAQSKVQSLLSDEQKQAITGMKPFFGVQAGDLFIATTGYTGEAGYEIAMPQEQAADFWQQLLKEGVKPAGLGARDTLRLEAGMNLYGQEMDESISPLAANMGWTIAWEPEDRQFIGREALLKQREAGTEQLVGLIMREKGVLRSGLTVGFTDETGATHFGAITSGTFSPTLGFSIALARIPRGVGKQAVVQIRNREMPVQVVKPGFVRMGKSLVG

SEQ ID NO: 5437 - protein, 133 aa, Xenorhabdus sp.
MEPMSHVPVELKYTESHEWVRSEGNGEYTVGITEHAQQLLGDMVFIDLPEIGMQVNIGDDCAVVESVKAASDIYAPLSGEVIAVNPALEGSPELVNSEPYNDGWLFRIKVTDESKLSELLDAEKYRALLVEEE

SEQ ID NO: 5438 - protein, 958 aa, Xenorhabdus sp.
MTQTLIQLENQGEFIRRHIGSSAGQQEEMLAMVDASSLDDLTNKIVPRDIALAEPPAVGDGATEQQALAELKAIAGQNKRYQSYIGMGYAPSILPPVILRNLLENPGWYTAYTPYQPEVSQGRLEALLNFQQVTIDLTGLDLASASLLDEATAAAESMAMAKRVSKLKNAERFFVADDIHPQTLDVVRTRAATFGFDVIVDKAEKVLELEGIFGVLLQQVGTTGEVHDYSDLITKLKQQKIIVSVAADIMTLVMLTAPGKQGADIVFGSAQRFGVPMGYGGPHAAFFACRDEYKRSMPGRIIGVSRDAAGNRALRMAMQTREQHIRREKANSNICTSQVLLANIAGMYAVYHGAEGLKRIAGRIHRLTDILASALQKAGLTLRHKTWFDTLTVEVTDKAPILARAEKAHINLRTDILGAIGVSLSEKTSREDLITLFQVLTGTETVLDIDALDLEISEGSQSVPVSMLRNDEILTHDNFRRYHSETDMMRYLHSLERKDLALNQAMIPLGSCTMKLNAAAEIMPITWPEFTDLHPFCPPEQAQGYQQLISQLSNWLVLLTGYDAVSMQPNSGAQGEYAGLLAIRHYYASRGEQHRHICLIPSSAHGTNPASAHMAGMTVVVVDCDKDGNIDLTDLREKAEKHRDELACIMVTYPSTHGVYEETIRQVCDIIHQNGGQVYLDGANMNAQVGITTPGFIGADVSHLNLHKTFCIPHGGGGPGMGPIGVKKHLAPFLPGHSVVEMDSLTSQGAVSAAPFGSASILPISWMYIRMMGAKGLKQASQVAILNANYIAARLKGAYDILYTGRDGYVAHECILDIRPLKEEFGISEMDIAKRLIDYGFHAPTMSFPVAGTLMVEPTESESKMEIDRFINAMLAIREEINKVAKGDWPLEDNPLVNAPHVQAELVSEWDHAYSREVAVFPTIETKENKYWPTVKRLDDVYGDRNLHCSCAPIEDYR

SEQ ID NO: 5439 - protein, 95 aa, Xenorhabdus sp.
PRNFVVADKGYDSQALRTYIEEQGATAVIPYRKNSRNSDKKWDKDLYRYRHLVENAFARIKHFRAIATRYDKLARNYASTLALAFIIIWLPMWVE

SEQ ID NO: 5440 - protein, 199 aa, Xenorhabdus sp.
SKVFIDLRDRWFPSGADTPQTRKAGAGAEFFPRRFRRSRGVNDHEQGYCSSCRRWNRRPCLSAEALAHTLEARGYQVHLVTDSRAERYAGKFPADEIHVVPSATIGSKNPISVVRSLWKLWVGLRAARRLVAKLKPVAVVGFGGYPTVPPLLASTGLGVPSIIHEQNAVMGRANKALAAPLKAIAGGFLPPANGQYSDK

SEQ ID NO: 5441 - protein, 247 aa, Xenorhabdus sp.
MNNVELEHVINTELNVREFQDYAPNGLQVEGRPHIQRVITGVTACQALLDEAVRLEADAIIVHHGYFWKNESPVIRGMKRRRLQTLLCNDINLYGYHLPLDAHPTLGNNVQLARQMGVKIIGNIDALLPHGVFDQPITPAELTERLEQRLERKVLHCGDNAPEEIRTIAWCTGGGQSFIEQAAEFGVDAFVTGEVSEKTIHVAREMGMHFYSAGHHATERYGIKTLGEWLANHHGLDVTFVDIPNPA

SEQ ID NO: 5442 - protein, 117 aa, Xenorhabdus sp.
VWIVILTPRFEEWLDEQDISIQKKILADLSVLEVFGPQLGRPAVDSLYGSKFNNMKELRIQCKGRPFRALFAFDPLRQAIILCAGDKALNNKRFYKEMIPIADAEYEAHLANLEDKK

SEQ ID NO: 5443 - protein, 117 aa, Xenorhabdus sp.
MNNLVEIFIDVDDFCRFFIPQWEQFCLNKGYRLRRRKGHMYPSEIMTILILFHLSHYRDFKNFYLEHIWRYHHHDFPTLLSYTRFISVAPSVLVPLCSYLTQLKGNPTGIAFIDSTR

SEQ ID NO: 5444 - protein, 448 aa, Xenorhabdus sp.
AQKILQTPQRPNDRIQLRLMVKTGSLAEKSYQQGYTYLIPKIVLSSSKDLSSQKLENLWHNAVDSKNPFPPAIVSYDFTLYSLSLPNNKPELLQDALIWLSDIAGGAVFTPQTLTPAMKTSEHLVATLPSDIHDPVWRTRLQGSTLIGHDPGANVSIPVDVKKVEAFYRQWYTPDAMTLYIAGNVDSRILPERLNQVFSSLEGKRQTPVAVPILLPLKTETLGVESEKAIQDRLSLAWNLNWQPINDSQTLFQHWSNELAREALYHYLQLKLEENQNNAKLDLDCRVVYQRANCYLNLNAPSGKLTDSTLYLASALASLRESGLPQEQFDELYKQKRIQLQHLFAVYARTDTDVLINQRLISQQNNVIDIAPEQYSRLRQIFLSSLTPQVLNKKLQEMLSQETSFILVQPKGEAIIDVNQLRDSFNQIMRPGPLPEEPKETEAIKKAD

SEQ ID NO: 5445 - protein, 207 aa, Xenorhabdus sp.
MISLYTDSSPNGFKITIALEELELPYVVNHVHIEKGENLLPEFLQLNPHGRIPVLSDSETNTTIFESAAILLYLADKTNKLLPSEHNARWQAIQWLIFHASSVGPIIGQRVNFEIFDEGKNKEATERYKKLTERAFSTMDNHLANNLYFGGKEYSIADIANFGWTHIARIINFDFHHYKNLSEWHHRIAARPAVQRGILIPEPATGP

SEQ ID NO: 5446 - protein, 322 aa, Xenorhabdus sp.
GRVIQELLFGSTSAIVTEKRARTVQSPGGTGALRTAADFIAKQTNAKRVWISNPTWPNHKGVFSSAGLEIREYNYYDAEKHALNFEGMLASLSEAQAGDVVLLHGCCHNPTGIDPTPEQWQKLADLSAANGWLPVFDFAYQGFAKGLDEDAEGLRIFAKNHNELIVASSYSKNFGLYNERVGACTIVAADSDTAEKAFSQAKFIVRTNYSNPPAHGASVVTTILSNEELKAEWIQELATMRERIQRMRQLFVNTLQEKGAKQDFSFICAQNGMFSFSGLTKEQVERLREEYAVYAVSSGRINVAGLTLENMVPLCEAIVAVL

SEQ ID NO: 5447 - protein, 188 aa, Xenorhabdus sp.
MNQEKLSVPSNEEMEAIFKQSQDIYEQEQLHYEAIAKEKPELANLFGGIPVINPPIYPIPVIKTAEYVSGYFNINTYHQIGSYPFIQVSSYPVLIGNNPHTRRNANFNGYIYGSYNMPQINLNNLYLSGVVHHTNTIINTPLNFQLFIYPQKIHLRLFKGNVYLGDLISVYQHNILVTYPIVFSGIGT

SEQ ID NO: 5448 - protein, 328 aa, Xenorhabdus sp.
MKQVVYTASPNSRQIHVWSLNIVGELSLLQTVSVPGEVQPMVIHPDGKHLYVGIRPQFSIITYEISTDGRLEQQSIAPLPGSPTHISTDRAGRFLFSASYSFNNLSVHPIDEDGIAKAPIQVVEGLKAPHSANIDRENRQLLVPCLKEVHIRIFDLNDHGYLTERRADEMTTKAGAGPRHMAFHPEKEAIYCINELDSTVDVLRKWEKYRIVQSIDSLPADFSAVRWSADIHITPDGRHLYTSERSESVISHFIVSEDGYHLTLAGHYPTESQPRGFAIDHSGRFLIASGQKSDHISVSGIDKYTGKLTQLARYPVGKGPMWVTVLAL

SEQ ID NO: 5449 - protein, 347 aa, Xenorhabdus sp.
IVSERQQWTIKQAQSLFDMPFFELLFQAQQVHREHFDPQQVQVSTLLSIKTGACPEDCKYCPQSSRYKTGLEKERLMEVEKVIESARKAKNAGSTRFCMGAAWKNPHERDMPYLEKMVQEVKSLGMETCMTLGMLNPSQAQRLAEAGLDYYNHNLDTSPEFYGNIITTRSYQDRLDTLENVRDAGIKVCSGGIVGLGEEIRDRAALLVQLANLPKPPESVPINMLVKVKGTPLENNEEVDPFDFIRTIAVARIMMPKSHVRLSAGREQMNEQTQAMCFMAGANSIFYGCKLLTTPNPGEDKDLQLFRRLGINPQQTKIAFGDKQQQQHLTEAIINNADNEQFYNAAI

SEQ ID NO: 5450 - protein, 210 aa, Xenorhabdus sp.
MEKEDRIIADRLNHASLMEAAMHSPAQFRRFLHNNPISLKQHLGKACAGKTLVVTEGVFSMDGDSAPLSEITRLAQSTGSWLMVDDAHGIGIYGDEGRGSCWLQNVKPEILIVTCGKAFGLSGAAVLCDEQTAEYFVQYSRHLIYSTSMPPAQAVALSEATRQIRAGDELRQRLQNNIQYFRREAQNLSFSLTDSETAIQPVIIGNNERC

SEQ ID NO: 5451 - protein, 271 aa, Xenorhabdus sp.
MSYRVIALDLDGTLLDPQKNILPESLAALNEARQAGIKVLIATGRHHVAIHPFYQALKLDTPAICCNGAYSYDYQAKKVLDANPLSIQEASQVLSYLQGTEIDHLMYVDDAILYESPHTVTRTLAWSDSLPEHQRPTLLHINNFQEALNNVNFIWKLATTSPDLAKLREVSEQIREEVDLECEWSWFDQVDIAKKGNSKGLRLQQWVESQGMSMKDVIAFGDNFNDISMLESAGLGVAMGNAVDDVKARADLVTKDNVQPGIGEVIRKYVL

SEQ ID NO: 5452 - protein, 425 aa, Xenorhabdus sp.
MNPSDIDFDLRHIWHPYTSMSNPLPTYPVDSASGVELVLSDGRKLIDGMSSWWAAIHGYNHPVLNEAAKSQIDKMSHVMFGGITHPPAVELCKQLVAMTPASLECVFLADSGSVAVEVAMKMALQYWQAKGQQQKRRQKFLTLRHGYHGDTFGAMSVCDPENSMHSLYQGYLPNHLFADAPQSRFDGEWQPEDISSFQQLLLQHHDEIAAVILEPIVQGAGGMRIYHPEYLRQVRNLCDEYQILLIADEIATGFGRTGKLFACEHANIEPDILCLGKALTGGYMTLSATLTTRHVAETISQGEAGCFMHGPTFMGNPLACAVAGASLKLLTESPWQQRIHSIESGLKAELLPLKSYNSVEDVRVLGAIGVVEMKQPVDVAALQRHFVQQGVWIRPFGRLIYLMPPYVIQPEQLLKLTNAIADAVI

SEQ ID NO: 5453 - protein, 196 aa, Xenorhabdus sp.
FVLPFSPTRLLIENTYYVDDKLRDKSILTSEIAEYANQQGWRLRSLVREECGCLPITLMGNNPEFWQSLEGQPVSGMRAILSHPTTGYTLQHAVRLADRIANLPVFDHINLFLTLKEYSNAQWKRQRFFRMLNRMFFLAGEQNNRWVIMQRFYKLSPELISRFYSGKTTRIDKIRILLGKPPIPLVSAISAIIKRH

SEQ ID NO: 5454 - protein, 165 aa, Xenorhabdus sp.
MSDSFQNEVPKARVNIKLDLHTGGAQKKVELPLKLLVMGDYSNGQEQRPLSEREKININKNNFNSVLADFQPGVKLTVENTLAGDGSEENVALSFKDMKDFEPEQVARQIPQLRAMLAMRNLLRDLKSNLLDNVEFRRELEVILKDSSLSDELRSELAGLAPKHD

SEQ ID NO: 5455 - protein, 514 aa, Xenorhabdus sp.
MSVNTETMQGAQETVLAQGTVPEGVYAALFEKINLNPVSTLGDINVYQDNAALADATADERVTAAVQVFLERLKSAGQKVERLDKTLLDHHIAELDQQISHQLDVVMHHPEFQKVESAWRGLKFLVDRTDFRQNVKIEVLDVAKDDLRQDFEDSPEIIQSGLYHHTYIQEYDTPGGEPIAAIISDFEFNRSPQDVALLRNIAKVSASAHMPFIGSVGPAFFGKETMEEVAAIKDIGNYFDRAEYLKWKAFRDSDDARYIGLTMPRVLGRLPYGPDTIPVRNFNYVEQVKGPDHEKYLWTNATFAFAANMVKSFINNGWCVQIRGPQAGGAVKDLPIHLYDLGTGSQVKIPSEVMIPETREFEFSSLGFIPLSYYKNRDYACFFSANSSQKPALYDTADATANSRINSRLPYIFLLSRIAHYLKLIQRENIGTTKDRRLLELELNNWVRGLVTEMTDPSDDLQASHPLRDAKVVVEDIDDNPGFFRVKLYAVPHFQVEGMDINLSLVSQMPKAKA

SEQ ID NO: 5456 - protein, 75 aa, Xenorhabdus sp.
MAIPVYLWLKDDGGADIKGSVDVQSREGSIEVVAQDHNLYIPTDNNTGKLTGTRIHTPFIFPYKRLKPPTLVGQL

SEQ ID NO: 5457 - protein, 492 aa, Xenorhabdus sp.
MNRIPVIGSGFGGIALAIRLQAANIPTLLLDKRDKPGGRAYVYQDKGFTFDAGPTVITDPSAIEELFLLAGKKMSDYIELLPISPFYRLQWQSGEIFDYGGDQVKLEKQIARFNPGDVQGYREFIRYSKAVFKTGYLKYGMSPFLSFRSMVCAMPSLVQLSAWKSVYGIVSKHIKNEHLRQAFSFHSLLIGGNPFTTSSIYTLIHTLEREGGVWFPRGGTGALVNALVKLFIDIGGVCKLNTQVESFITNDNQITAIKLNDQREIYCKAAASNADVIHTYEKLLGRHCVGKRRSDSLKEKKMSNSLFVIYFGLNKLHIQLAHHTICFGNRYKELLDDIFEGNSIPGDFSLYLHSPSVTDPTLAPPGCASYYVLAPVPHLGNAQINWLEESPRLRDRIFSYLEKYYIPGLRDQLVTHKIFTPFDFRDELNAYHGSAFSIAPLLLQSAWFRPHNRDSDIENLYIVGAGTHPGAGIPGVLASAKITANLMIEDLC

SEQ ID NO: 5458 - protein, 288 aa, Xenorhabdus sp.
IIKNIGILLILYVPLTIASPVNFNENLPSLTMNEGINNLQNSEREINRLIEERRHQEMINRSRRYSTKESLVNLKGEKKCLPISGIYLQGISLLSSSDLKTLSPISNSCITSNNINRLTSEITNLYVQKGYVTARVKLVPPDYEKKLGIHVIEGFIEDIRGGSLWVNSQTLFPDLKNMPLNIHQLDQGLDQANRLQSNKTTLDILPGTINGGSIVFLNNKHSSPWKVSLTTDNYGQKNTGKWVGRVNTSFDSPLGLSDFVSLSGSSTLKKGQNKYNRTYIFLYSLPYG

SEQ ID NO: 5459 - protein, 79 aa, Xenorhabdus sp.; identical to SEQ ID NO: 5247

SEQ ID NO: 5460 - protein, 132 aa, Xenorhabdus sp.
ENYHVSTDKSLLDVTAIHQFLTQSHWAKGIDIETVQCSIENSLTFGLYDEENQIGFARFVTDFSTFGYLCDVYVLEKYQKQHLGSWLMECCQSHPVIQKLRRVMLVTSSAHWLYEKLGYSPVNRENFVWQIF

SEQ ID NO: 5461 - protein, 297 aa, Xenorhabdus sp.
YAVTIGATNIDITSYAFDKLVYNDSNPGKIISTPGGVGRNIAQNIAALKNESYLISVVGNDQHGKILSEKTKSSGVNTKYLHKLDDEKTSVCNSFIDENGKCIISINDMSILDKLNPSLLSQSKKLIQSASVLVIDCNLSHESLEWIFLNSNNVPIFADTVSTFKASNIRHWLPYIHTLKPNRSEAEMLSGIKIETLEDATLAASWFHQQGVQRIILSMDAEGVYYSELDNKSGYSRALTNNVVNANGAGDVMMAGLAHCWLAGMELEDSVHFSQQCSAFTLSSENIDIFPNKFSLR

SEQ ID NO: 5462 - protein, 111 aa, Xenorhabdus sp.
MENAVTKPIERAVSGLPGIRHINSTITDGVSITIVEFNLTVDPNVAVNDIREQITQIRAELPQTIDEPLINRIDVEGGSILNYVVQSKDKSLTELSWFVDDKLSKHLEHMV

SEQ ID NO: 5463 - protein, 222 aa, Xenorhabdus sp.
MEANSALAALNAAKAEYRQLQALLQEEKSQRAKTTILAPNDGVISERVATVGMTTDNNYLFKLIADNQYEFSAEAYITELKQIRVGFPSTITLTEGEKITGKVRYISPKINPVTQIGTIRIALENVPADIRPGDFGYAFFQFKPENINAIPYSAVNITNGNKASAFIVGKKNVVEKKQLNIGRIFGNWVEIKSGLSANDKVVISASPFLQEMDTVSIKPQGK

SEQ ID NO: 5464 - protein, 317 aa, Xenorhabdus sp.
MKNKKTIPTPHDAAFKGFMAQIENARDFFDIHLPEKIKKLCDFNTLKLTNSSFIDRQLRSKMSDVLYSVKTQQGDGYLYVLVEHQSTPDKMMAWRMMHYAFMAMNQHLQQGNKELPLVVPVLFYHGDTSPYPFQKVWTQCFSLPELANEMYFNPFPLVDVTVIDDNELVNHRKIAVMELAMKHKNLRERVEAVTTLLAQALKYNYNSDNDVVTILNYLFVTLDSPHFEQVLQQLIEQADSHQEAIVNIAQRLQEKGREEGIQQGMVQGIQQGIEQGIQQGEKQASINIARNLLKNGASIELVMKSTGLSREELLSLQ

SEQ ID NO: 5465 - protein, 180 aa, Xenorhabdus sp.
MDKKITCDDNRFCISSAYGTASAMMNIVELLYGKSAREHCAHFLFGENENQSSYDSVSFVPYRQHSDLLIHKLQDWMHSFPSEILSVADLASKIHLCERQMKRRFKIATGQTPIQYIQKIRLSQAKHWLEKSQKTIEEISHEVGYEDTRYFRELFKRCNGLTPKEYRQKYHHHTGRFSVE

SEQ ID NO: 5466 - protein, 55 aa, Xenorhabdus sp.
LIRLPEVQRRTGYSKAWIYRLIKEGQFPKQVKIGPRSVAFVESEIDGWVDQRIAE

SEQ ID NO: 5467 - protein, 32 aa, Xenorhabdus sp.
VEVLADLSALKMDDLSYSIYIDQRSINSTTTD

SEQ ID NO: 5468 - protein, 38 aa, Xenorhabdus sp.
VSTDFTTWAKFEGASRSRTQVDGFAIRCMACLATRSAL

SEQ ID NO: 5469 - protein, 144 aa, Xenorhabdus sp.
MPQINRSALVPYSVEQMYKLVNDVKSYPDFLPGCVGSRVISSHGNEMTASVDVSKAGISKTFITRNTLSDNQSISMQLVDGPFRKLMGGWHFIPLSENACKVELHLDFEFTNKLIELAFGKVFKELAGNMVHAFTQRAREVYSV

SEQ ID NO: 5470 - protein, 97 aa, Xenorhabdus sp.
VSEINIEVIYALPERQYLRNVKLPQGATVEQAIMASGLLELRSDIDLAKNKIGIYSRPAKLADTLEEGDRVEIYRPLIADPKEMRRKRAERAKNSTQ

SEQ ID NO: 5471 - protein, 193 aa, Xenorhabdus sp.
MSSKDQKVPDEQVSENTENVFEQQMDAEKADAPETESIVDPRVAELEEELKQAQSRERDAILRARAEVDNIRRRAEQDVEKAHKFALERFSNELLPVIDNLERALEAADRTNETLVPMIEGIELTLKSFIDAVGKFGIEVVGDINVPFNPEVHQAMTMMESDQHEPNHVMLVMQKGYTLNGRLLRPAMVAVSK

SEQ ID NO: 5472 - protein, 103 aa, Xenorhabdus sp.
  unsure (1)..(103): unsure at all Xaa locations
MTKKKAHKPGSATIAMNKRARHEFFIEEEFEAGLSLQGWEVKSVRAGKANISESYVLLKNGDAYLFGATITPLNVASSHVVCDPTRGPXVXNWLXLNPKPPXX

SEQ ID NO: 5473 - protein, 114 aa, Xenorhabdus sp.
MRCKLLTAATISLVMLTAGCSMFERVIYRPDINQGNYLTPDAVSKIHKGMTQQQVTYTLGTPMLTDPFGSQTWYYIFRQQPGHEKVKQETLTLTFDSNGVLTDIKNEKSLPKNG

SEQ ID NO: 5474 - protein, 557 aa, Xenorhabdus sp.
MLAQLTISNFAIVRELEIDFRSGMTTITGETGAGKSIAIDALGLCLGNRGEANMVRAGAPRTDICARFSLADTPSARKWLETHQLDGSFDDDNECLLRRTITADGRSRGFINGTAVPLSQLRELGSHLIQIHGQHAHQLLLENRHQRHLLDTYAGEFTLKNEMKQAYQQWRQSCQDLAQFQQQALERRSRQQLLEYHLKELNELAPQAGEYQEQDSEYKRLANCGQFLSGSQDILQVLSDNDEQNIVSLLNYARNELTELASMDHKLSGLLNMLEEASIQISEVSDELRHYSDQLELDPNRLFELEQKISQQISIARKHYVSPEELPALHQQLLEEQHQLSQQEDDCAHLSELVSVHYQQALSVAEKLHQIRQQYAIELSQLITNSMHQLSMPHGRFTIDVIFEPEHLNLDGASKVEFNVTTNPGQPHQSLAKVASGGELSRIALAIQVITAKKMETPALIFDEVDVGISGPTAMIVGRLLRELGESTQVMCVTHLPQVAGCGHQHFYVSKQTDGEETETQMQLLDRKARLQELARLLAGSEVTKNTLANAKELLAA

SEQ ID NO: 5475 - protein, 134 aa, Xenorhabdus sp.
MIDFEVYIDERFAFSQRSDGLIIATPTGSTAYSLSAGGPILTPNLNAIVLVPMFPHTLSARPLVVSSESSIRLKFSQNSNDYEVSCDSQIVLPIQDGEEVIIKRSEYNLHLIHPKDYNYFNTLSTKLGWSKKMF

SEQ ID NO: 5476 - protein, 114 aa, Xenorhabdus sp.
MNNEFKCIGIVGRPRHPEALATHEMLYHWLVSKGYCVIEDRQVAKDINLKDAQTGGLTEIGKTADLVIVVGGDGNMLGAARVLSRYDIKVIGINRGNLGFLTDLDPDNALQHAF

SEQ ID NO: 5477 - protein, 226 aa, Xenorhabdus sp.
MSAPLTWHDVIGNEKAQPYFTDTLTYVANERKAGKTIYPPQQDVFNAFRYTELADVKVVILGQDPYHGPNQAHGLAFSVQPGIPAPPSLVNMYKELESDIAGFQRPNHGCLLSWAKQGVLLLNTVLTVERGNAHSHANLGWETFTDKVIAAINEHRSGVIFLLWGAHAQKKGRIIDTQRHHVLKAPHPSPLSAHRGFLGCKHFSQANHLLEAQGLASIDWNPVLPE

SEQ ID NO: 5478 - protein, 682 aa, Xenorhabdus sp.
KKLPVIMQTEVTECGLACLAMIASWHERETDVYSMRKIFDVSNNGMSLRQLITVADRINMNARAIRLDLGELRNVRLPCILHWSFNHFVVLKKITKKNAIIHDPALGKKTISLKELSNKFTGIVLEVWPRSDFKKEKVSESITITDMFRGVANLKITLLKIILISLFIEGLALSIPLSSQFIIDIVLRSSDFEMLNLIVIGVIFLLILRSALSIIRAWTLMAMRYSLGIQWSIGFFNQLLSLPLTFFEKRHVGDIASRLTSLNEIKEAFTAEMLTSLLDVLILLTLITLMFCYSALLALNSLLIIFIYLSVKLALYNTYKSARIEAIHNEALQSSHFLETVRNVACVKVFSLTENRRMTWLNKVINTANARAHLFKIDLINQTLSGFLTGLSSATILFFGGKLMEHGIITTGILFAFMLYADMFLTRSIKVINSLFNFRLISIHSDRLTDVATAETEDAWYSKNLIPLEAVEGRITLNNLSYRYGEAEPFIFKDINLEINAGENIAIIGSSGCGKSTLLRIMAGLAIPQSGSVLIDGTSIRQIGIDEYRRHTAFVMQEDKLFAASLMDNISSFDPQPDLEWMYECAKAAAIHNEIIAMPMQYETMIGDMGSILSGGQKQRVSLARALYKRPRILFLDEATSDLDVFNERKINNAIKQMPITRIFVAHRPETIAAADRIYNLK

SEQ ID NO: 5479 - protein, 421 aa, Xenorhabdus sp.
MSTEKHENSIYRAEALQHKQEGWLGVSYLDIPSSLSICILTGMLTVAFIVSIIIFGSYSERVNATGNVIYDPPAVSLIAQNNGIITNSVASEKKLIKQGEVIFSVSDETETNLGATKFEIEESLKKQQNILLKKMNIITTEADENKTYFIERIKNKEQEINGLNILIKNSEEQRKWFEKKSGLYEQLRKKGLARDSEFIDRKKDYYSAIVNLSSARVKIITLQGELLDLKNKISATDRESDSAKKLITAEIAGIKQKILNIERQREYLIVAPFNGKITSVTAHKGERVKTGQQVAVIVPLAARPKIELLSSSDSLGEVADGQQVKMRIAAYPYQWYGKVAGVIETISEAPVNIPPSTQTNSEGKALFRITVRPVMTEQQKSLSLLPGMKVETEIYVRTRKNYEWLFMPVKRVYERICDNTQ

SEQ ID NO: 5480 - protein, 349 aa, Xenorhabdus sp.
MILSELHWLYGRPEATGVVKSIPEDFIVREDLGFSPDGEGEHLMVHIRKTGCNTQFVADNLARFAKIPARSVSYAGLKDRNAVTEQWFCLHLPGKQDPDLAAFQLEGCEILATARQKRKLRIGTLKGNDFTLVLRDVSDRQVVEKRLGQIAQTGVPNYFGEQRFGRDGQNLVQAQRWATNEIQVKERNRRSFYLSASRSAMFNAITSIRIGRGEHQQVQNGDALQLTGRGSWFVADESELAVLQQRVMDGELQITAPLPGDKALGTLHQALDFEQQCLQDYESLWGLVKRERVDSARRAMLVKPLNLHWEWLDDQTVTLHFSLPSGSFATSVIRELINQKQNNMADISE

SEQ ID NO: 5481 - protein, 134 aa, Xenorhabdus sp.
MNEDYWLSTLYGSEIKTVADYVCYSEKLRNAMEPHLISLLNAGISVILDFPANTIENRKWMKKIIEATEVENYLHFLDVPDSVCLARLHLRNQSGEHQFSVTDEQFAAITRAFVAPQEEEGFNIVLHGNKEINL

SEQ ID NO: 5482 - protein, 255 aa, Xenorhabdus sp.
LMLRILLSNDDGVTAPGIQTLAAKLREQYHVQVVAPDRNRSGASNALTLDRPLRISRLNNGDVAVQEGTPTDCVYLGVNKLVRPRPDIVVSGINCGPNLGDDVIYSGTVAAAMEGRHLGLPALAVSLDGDKHYDTAAEVTVRLLNMLQKSPLRAGNILNINVPDVPIEQIKGFRVTRCGCRSAAEEVYSLEDPKGNMLYWIGPPGAKHDAGPETDFAAVEEGFVSITPLQVDLTAYKAQELVTDWLLKAGDVGEC

SEQ ID NO: 5483 - protein, 142 aa, Xenorhabdus sp.
MTELLDLTPESKVLEIGTGSGYQTAILAHLAGHVFSVERIKGLQWQAKRRLKQLDLHNISTRHGDGWNGWPSKGPFHAIIVTAAPPEIPQALLHQLADGGVMVLPVGESSQSLKVVHRYGNDFHSEVIESVRFVPLIQGELA

SEQ ID NO: 5484 - protein, 247 aa, Xenorhabdus sp.
MRFQNSVVIITGGASGIGEATAKAFAAEGAHVVIADFSDHGKKVAEELHPKGNESIFIKTDVTSEESIKYMVSKTIEKFKRIDVLFANAGIAADNSADKLTVASWQKTIDVNLTGVFLCDKFVIHEMLKQESGGVIVNCGSIHSFVSREAITAYTASKGGVKLLSQTLAIDYAKNNIRVNTVCPGYINTPLLSKIPEELKEQLISLHPLGRLGKPEEVAKAVLFLASDDASFITGTTLLVDGGYTAQ

SEQ ID NO: 5485 - protein, 156 aa, Xenorhabdus sp.
GPSNIYPVVLLHGGMCNLTSFNPLAEYLDDYYLVAIDSRGHGKSTLGDVPLSYARLQSDVKAIIKGLDIKHCAIIGHSDGGIVALRLAVEQFAPLDKAVVIGASWVLTDKEPVREVYRGITAEYWKQKFPHDYVYYQQNNPVPNFEHLINTIKTMW

SEQ ID NO: 5486 - protein, 229 aa, Xenorhabdus sp.
KHNMKLWSKYFLCGIAISLLSACHQRPTEQGQQTGQGQQYKDGHFVQDLRLVDTPNTQGSPVNISDFATQVRLISETSPKLYASHRATFDAIENWTQYGGDVRNLNQFGLLAYQMEGEDNYGNVKFTGYYTPILQARHSRQGEFKYPLYRMPDKSISRLPDRSAIYNGALDKKWIIGYSNSLIDNFFMEVQGSGYVDFGDNSPLTFFGYGGKNGQAYRSIGKALIDKGD

SEQ ID NO: 5487 - protein, 146 aa, Xenorhabdus sp.
LLKGQNDETKTPFIVTPPLFKLTAGNETVLRIVKTGDNLPADRESLFWLNVKSIPATVKSEENQLQITVRSRFKLFYRPTQLAEDASIAYKALKFKVEGNKLTAENPTPYYISFAYLGIGNASKNHEIQTGRYASSFQSAELGYSY

SEQ ID NO: 5488 - protein, 848 aa, Xenorhabdus sp.
MIMDNSRHCLQYNISDNLVLFFKPIKALLCILATIWLLFSDKVYGEVYFNINALETLSGFPEDIDLSIFMQDDQQPPGRYWVDTYLNREKVDTGNVEFVLVNNKLSPRITLKQLKEMGVNVDLFPALAALSPETEITDLSQYIDSASSSFDFNKQRLDISIPQAALHNKVRDYVPPHLWQQGLTSLQVNYSYSGSTNWLDGQSGSNSHNFLNLRSGANWDAWRLRNYATYSSQNNKWRSLNTYLQRDIHSLKSQLTLGDSYTPSPIFDGFQFRGMQLVSDDNMLPDSLRGFAPTIRGIAQSNAQVTIKQNGYIIYETYVPPGPFIINDLYPTTASGNLEVIIKEADGKEHRSVQPFSAVPVMLREKSLRHSLAFGKYRSSAQHSKTPYFVQGTASYGLSNNVTLYGGTIFSKNYQSVALGTGYSLYDWGSFSFDITHAKSELTSDIRASGQSYRFQYAKDLTLTGTSLTIAGYRYSTHDFYDFKEVNEFDITSNNRYNTNKRSKLQMHVNQSLGDLGGVYLSAFQQDYWSQKGYERNISAGYSSSYNSVNYTLNYSYNSLPGTNHKDQIISLSVQIPLDRWLKNSWASYNLTNNKKGETSHQVSLSGTALEDNNLAYSIQQNYDNRNTGIGGNLTTEYKGAYGQVGVGYNYNRQSKQLNYSLNGGVVAHPYGITFSQSLGDTLVLVRANGAKGIKVHNQTGIATDRRGYAIVPYASSYRKNRISLDTYSMGDNVDIDISTQTIVPTQGALTLADFQTRIGYRVLLKLSHKGKEVPFGATATLVQQNESDEPSSTIVSNDGQAYMSGIPESGQIWIKWGHKDTQECRVNYQLPEKTPESGLYMLDATCE

SEQ ID NO: 5489 - protein, 333 aa, Xenorhabdus sp.
LLASIFIVGTMSSFASQANHRGYDCGYYNFTPGKTQVSFGSSIVVPKDYPMGRVIKEITLEQIYNTGYVAYCNGLVSTSWGTPSFRRIHYNYDAIYDSGVSGIGIRINNWPNEPYGHDWLPRTSNNPTTCYPPDGESWSYTYYCGRTWGYLTVQLVKIAPNTGTGRIGGGVLTSAILGNNWLIHTFYLDNTEIITPTPSCSLTHKTTLVNMGKVRTSEFRGMHSATQTKDFNLELDCDANAKTTMRLDGRPAKNGYSNIWALDQDSDNVTAKGVGLQIIFLNRFLSQGESIVLQPSDQVRHFSLPMQARYIQTEARVTPGRANATATVTLTYQ

SEQ ID NO: 5490 - protein, 322 aa, Xenorhabdus sp.
TGRCWLMNEKEPFLTTPYLQFDREHWATLRDSVPLTLTAEEFSALKGINEDISIDEVVEIYLPLSRLLNFYISSNLRRQAVLEQFLGTGGQKIPYVIGIAGSVAVGKSTTARLLQALLSRWPEHRRVKLVTTDGFLYSNNILNERGLMKKKGFPESYDMRSLVKFVSDIKSGAEKVAAPVYSHLSYDIVPDEQLIIERPDILILEGLNVLQSGMDYPHEPHHVFVSDFVDFSIYVDASEQLLEQWYVSRFLKFRQGAFSDPESYFHNYSKLTTEEAVKVASDIWREINGLNLQQNILPTRERASLILTKGKNHAIENVRLRK

SEQ ID NO: 5491 - protein, 283 aa, Xenorhabdus sp.
NKHIQVIREWGVEILTIPGKGYRFPAPMNLLSKDIIENYLLESRIEVIPVIDSTNQYLLDKLTELTSGDTCVAEYQYAGRGRRGRQWVSAFGRNLYLSMFWRLEQGPAAAIGLSLVVGIVIAEVLNRQGAEKVKVKWPNDLYLDDKKLAGILVELMGRTGDAAQIVIGIGMNISMSSEQQKIINQQWTNLQQAGVTVERNKLVTEIVTELKKALVQFENEGLQSFVPRWFKLDNFMNRPVKLIIGEQEIYGIARGIDQQGALLLDIDGIVTPYIGGEISLRGC

SEQ ID NO: 5492 - protein, 561 aa, Xenorhabdus sp.
MITLGVSGSFETFETPVIGDIPNWFGHDASAAIIKDGKIVAAVEQERLDRIKHSNQFPIEAIVECLKIAQLKITDVDKIAFYFEELNTDTGLGLQYIERKNLEVEHSRNLIKKILVSKFGEVVKDIPIEYIRHHDTHAIMAAENSGFDSSLVIVIDGNGEDESTSIYSYIDGFVKNIYRYPVSSSLGRYYLDCISLLGYERFDEYKVMGLASYGKQNKFDELFENLINFEENGNISFNHTNIPAYLLDNGISPRRENEQISESHQNFAHSIQKYLEKMALHIISFWSKKLGQRNLCLSGGVALNCTLNGKLAFSGLFDNIFVHPASHDGGSAVGAAMCAMYPDARINGNKLENVYLGPDINSKFAFEIIERNKNIIEVVNSEDELRFLANEISNGKIIGWARGRMEYGPRALGSRSILADPRPIESKYRTNQIIKQRESYRPFAPMVLLEEISDWFLVPDCKVNLEYMVFNLPVIKENKQKLAAITHVDNTARVQAVGKYNKDIYQLIKNFKEITGVPILLNTSFNVNAEPIVCDAYDAIQCFLLTDLDYLVVGDFIIKKR

SEQ ID NO: 5493 - protein, 251 aa, Xenorhabdus sp.
VDSLKVKYIERYIAERKANNLSHRTLQNEMSVLRAILAQAGKHKLADPNNARLSNRALGIVGTSRKGTKMALAPAAFRDIFQQVEQKDRRVAAVMQLAYVLGLRTKEAVEAYKSLATWKKALENGHTSVRVVFGTKGGRPRQTVILDRAALQHAIAYAEREQARRSGKLIDKPTITQAIDRYRYIVRSSGLTGKNAPHSMRYHFAQQSGEHYIAQGFSEREVLALVSMDLGHGDGRGRYIKQVYYQNIESE

SEQ ID NO: 5494 - protein, 205 aa, Xenorhabdus sp.
WPVCDVDLLTDVERALRSTRWTLSGQSEVLPYFSSLFSRRWADYIGTKHAIPCTSGTAALSIALEAIGILPGDEVIVPGMTWVAVAQVVYNLGAIPILTDINPLTGQIAEKAIRENITQNTKAIILVHAYCGMADVKKIGAIADKYGLKVIEDCSQSHGATWKSKKAGSFFDISVFSTQQSKLLTSGEGGVIATSSDDYYSKGNL

SEQ ID NO: 5495 - protein, 710 aa, Xenorhabdus sp.
YLEVDNGALSEATDFMADALAEPVLYPVNADRERHAVDNEMTIARAGEGHRIWQIRSETLNPSHPNARFAGGNLETLKDKPDRKLQTALEDFYQRYYSANLMKGVLYGKQPIDKLAQIAAETFGRIPNRNASVPAITAPAITEKEEGIIIHYVPSKPYKSLQLEFSIPNEIANFRSKTEGYIGYLIENRSENTLSDWLLKQGLSEGISASANPNVDGNSGSFSIYVELTDKGLQQRDQVIAAIFSYINLLKQKGIQQSYFDEMVKVFNLSFKYASIVRDMNYIESLADTMLIVPVSHVLDAPYLADKYNPQAILRRLDQLTPENARIWFTSPEEPHNKEAYFVQAPYQVNKISPKQFEEWQELEKGMSFSLPELNPYIPDNLTLIKTSGSQKHPRMILEQPNVRLLYMPSQYFADEPKANIVLELRNADGMKSAKEQVTYSLLSYLSDLALHQLGYQASVAGMGASVGYADGLQIGVYGYTQHLPELLTSTISQYMAFTPTQTELQQAKSWYRNQLEIANEGKAYEMAMQPVSRLSGVPYIEQAELLKSLDGVSIDDVIKYRQKMIQSAALQAMIFGNLTEKQGIDIINSAHKQLGNRGTEWWSGEHIELDRNYAVNFEGTASSTDNALAEIYIPTGYDRSTGAVYSNLLSSILSPWFYDQLRTTEQLGYAVFAFNTRVGEQWGLGFLLQSNSKQPDYLHQRYLSFYSAG

SEQ ID NO: 5496 - protein, 116 aa, Xenorhabdus sp.
MSDAEFEQYKTSLLTEMRQPPQTFSGEASRYSHDFGRNNFSFDTREKLLTSLEKVTKAQLMEFYDKAVMKRQGLALISQITGKKGSLHQYAQLKGWKTYPNVSTFQKKLPVKVNAQ

SEQ ID NO: 5497 - protein, 660 aa, Xenorhabdus sp.
  unsure (1)..(660): unsure at all Xaa locations
LNPLTLPLHGQRLIEASAGTGKTYTIGLLYLRLLLGLGGDAAFSRPLNVEEILVVTFTEAATDELRGRIRENIHQLRLACIRQDNDVSDPVYQQLLAEIPDRQSAAAWLLAAERQMDEAAIYTIHGFCQRMLVHNAFESGVLFEQTLIQDEHPLRKQGCADFWRRHCYPLSLSMATVISQEWSGPEALLMDVLAHLQGDMPYLVNAPDENETLVSRHEKIIALIDGVKQQWNEAIPDLQALIDNSGVDKRSYSKKHLPNWLNSVSEWAKSPTRDYQLPKELDKFCQSRLEEKTKKGEIPHHPVFAAIDDLYQQPLTLRDIILSKAIVEIRQSVNQEKLMRGYMGFDDLLTRLDIALKREGGEQLAETIRQRYPVAMIDEFQDTDPQQYRIFQAIYRNQPENGLLFIGDPKQAIYAFRGADIFTYIRARSQVSAHYTLETNWRSSASMVQAVNTLFSHTEKPFLFDQIPFIHVNSAEKNHNLKFLLNGQEQTALQFWLQSVEGVSKGEYEKGMAKLCSAQIRDWLQAGQNGDACLQQNEKSRPVTAADITVLVRNRREAALIRDELNELQIQSVFLSNRESVFDTPEAKDLLWLLQAVLAPEKERVLRSALASSLFGLSARQIDALNNDENTWDKLVDEFDGYARLWRSRGVLPMLXAVMG

SEQ ID NO: 5498 - protein, 127 aa, Xenorhabdus sp.
VFKAYQKLERSFHEIKLRKKFNDSYGKYKEEAEEVYKKYIKVCGRFKKSMREAGSIYVKLKKENEELTNKLNSLLDQQKDENISHKPAKQSIKTSSGKSFNGVHYSNNLLEDVSGQDCENYINKFGT

SEQ ID NO: 5499 - protein, 205 aa, Xenorhabdus sp.
MKILVIGATGNIGKHIISNIKKYHPLLADNPTELEIVQASRNSPENSLDVFDNQQLDNFLSKNKMFEAIICAFGKTNWTKPENLHDYEESIKNKAFGQINVALQALKYIKPGGSITLTSGIVGKIMSPNGSQTAVTNGAIEAFVRSAATEITDARINVVSPKLLDESFTSYAKFFPGQETCTGEQIAKGYIRSIYGKETGVVIEI

SEQ ID NO: 5500 - protein, 333 aa, Xenorhabdus sp.
QKIRWGIIGCGNVTEVKSGPAFYKLENSELIAVMRRNSDLAKDFANRHNVPKWYSDAESLINDPEIDAVYIATPPSSHKKYTLLAAAAGKAVYVEKPMALTFSECNEMITACQRHNVPLFVAYYRRALPRFIKIKELIDSGAIGTPLIVSCQLSREMESRYLDPENLPWFVQPEISGGGLFVDLACHTLDILDFLLGKIVSVKGHASSQAKAYPAEDCVSMSFMFENQVQGVGIWNFVASSREDKVEIMGTKGKIIFATFGDSPISYYDDKNTLHQFNFENPKHIQMPFIQTIIQQLRGKDISPSTGISASRTSWVIDEVLKEYRAELNSKFK

SEQ ID NO: 5501 - protein, 309 aa, Xenorhabdus sp.
VVINTIPQNIQPSEKIWEWFGYVLIANLILIIPLIWLAADWSLRPIKLLITQIRSLEKGERQELDENPPAELKGLIKNLNALLDNERQRYKKYRTTLSDLTHSLKTPLAVLQSTLRSLRSNKQMTIKQAEPVMLEQIDRISQQIGYYLHRANIYNDHNLILKKIFSVPTLLDSLTNALIKVYQHKGINVTLDISPELTWLGEKNDFLEVMGNILENACKYCLEFVHVTAMMGENYLTIIVDDDGPGVPPNKRHIVFERGLRADTLRPGQGLGLSIASEIVEQYDGNISIDNSHLGGAKVSVTFRNQQIT

SEQ ID NO: 5502 - protein, 375 aa, Xenorhabdus sp.
ITMNYQLNLDWQAFLQNHWQKRPLLIKQGFQQFTDPLSPDELAGLAMENEIDSRLVSHKKDRWEVSHGPFESYDHLGDQNWSLLVQAVNHWHHPSSALMKPFRVLSDWRMDDLMVSFSVPGGGVGPHLDQYDVFIIQGEGRRRWRVGDKIPMKQHCPHPDLLQVEPFEAIIDEEMLPGDILYIPPGFPHEGYAIEPSLNYSVGFRAPNARELFSGFADYVLANELGSHRYSDPDLAFRDNPALIQPNELATLRTMMQDLLEQPETFQNWFGEFISQSRHELDIAPPEPPYESDEIYDLLKQGESLNRLNGLRVLRVGDNCFVNGELMDTSHLQAADALCQYDTVTADILGDAIDDVQFISLLTALVNSGYWYFND

SEQ ID NO: 5503 - protein, 255 aa, Xenorhabdus sp.
QRFHRQIFYRDIRVANKIKKPHVVVLTGAGISAESGIRTFRSSDGLWEEHRVEDIATPEGFKRDPELVQAFYNARREHLQQAEIKPNAAHYALAELEQQIGDNFLLVTQNIDNLHERAGSKRVLHMHGELLKVRCCQSGQVIEWTSHLTVDDRCHCCQFPSLLRPHVVWFGEMPLGMEQIYSALSEADIFIAIGTSGHVYPAAGFVHEAKLSGAHTVELNLEPSQVESMFDEKHYGNASQIVNQYVQSLLHQMSE

SEQ ID NO: 5504 - protein, 412 aa, Xenorhabdus sp.
LPLALLTAIRFSQGRRRAGMVSLVSVISTLGIMLGVAVLIIGLSAMNGFERELKNRILSVVPHGQIYTVEQPFQHWKSALKQIRQTPGIAGASPYIEFTGLMERGDKLHAVQVRGVDPETEAEVSTLYKFVRDGAWRTFQAGKHQVILGQGVANSLNVKQGDWLTVMIPNSDPSLKLLQPKRIRLQVTGIFQLSGMLDHRLALVPLSDAQQYLDYGDAITGVAIKADDVFAAEKRVIAAGNATGRYVYISTWLKDYGYMYNDIQMIRGIMYLAMILVIGVACFNIVSTLIMAVKDKSSDIAILRTLGAKDGHIRSIFLWYGLLTGMVGSIIGAIVGIFMALNLTAIIKWIEKLSGHQFLSGDIYFIDFLPSELHTMDIFYVLLTALILSLLASWYPARRASKLDPARILSGQ

SEQ ID NO: 5505 - protein, 58 aa, Xenorhabdus sp.
RPMLSDPVWDKLFVFMQQNRLTYHKKTHRLIMEGILFRMRTGIPWRELPAEYGKWNTV

SEQ ID NO: 5506 - protein, 303 aa, Xenorhabdus sp.
VREDPQRVWHFLEEQSVTQACLTPALLRDGADLPALTIKPTIILGGEAPSPTLVQTLSRQATVFNAYGPTEITVCASHWRCPLNYTDTLAPIGRPTANTRFYLLDDGGQPVPLGAVGELYIGGDGVTRGYLNRPDLTDERFLVDPFTHAVDARMYRTGDLARYLPDGNLVFVGRNDQQVKIRGFRIEPGEIEARLTEYPAVREAWVLAQGDGQEKRLIAYVVMEDIEAEKDNGLATRLREYLSTILPDYMVPVAFVRLDAFPLTPNGKLDRRALPAPEQSAFRPSGLRSTTRGNRNYTGGHLA

SEQ ID NO: 5507 - protein, 783 aa, Xenorhabdus sp.
MGNRQRILSLFFILCKDRIRKNVMKVLIAKNEVGTKHHSHYIENAIHRLADKLIERDVEVVIADSFDDSYTIIAANEPIDCLMVSCALMDEDLYQQIQKLLNKLFERQEDVPVFLLSDREKAVFLLDHAMLEQLTEFAWILEDSSDFITGRAIAAMHRYRQQLLPPLMSALMNYRKIYEYSWAAPGHQAGVGFNKTPVGRIYHDYYGENLFRSDMGIERSSLGSLLDHTGAFGESERNTARVFGADHSYSVVVGTSGSNRTIMQACMTEDDIVLIDRNCHKSIEQGLILTGAKPVYMLPSRNRYGIIGPIYPQEMETKTLQKKLKQNPLTKDMVKKKPVYTVVTNCTYDGVCYNAKHVQNLLDKSVDRIHFDEAWYGYARFNPIYHDHYAMRGDPKTHKGPTVFATHSSHKLLNALSQASFIHVRDGRNPIDFSRFNQAYMMHATTSPLYAICASNDIATSMMDGNSGYSLTQEVIEEAVDFRQALARLYRDFSKKGDWFFKPWNQEQVTDPATGKKMLFADAPRDLLTTKQSCWTMNPGDSWHGFEDLPNDWSMLDPIKVSILTPGMGDNGKLLKQGVPAALVTAWLSQHGIVPTRTTDFQIMFLFSMGITKGKWGTLLNTLLSFKHHYDANTPLSKVFPDLVHDYPDVYSTSGVRDLGDKMFAYLHKNNPGEKLNQAYAILPEVDMIPRAAYQAIVTNDVELVALDKLPHRIAANSIIPYPPGIPMLMSGENFGDKNSPQISYLHALQKWDHEFPGFEHETEGTEIINGIYHVMCVKRKGK

SEQ ID NO: 5508 - protein, 442 aa, Xenorhabdus sp.
MATVAESTKVGLIPVTLMVAGNIMGSGVFLLPASLAATGGIAILGWLVTIIGAVGLSIVYAKISSLDDSPGGSYAYARRAFGPFLGYQTNVLYWLACWIGNIAMVVIGVGYISYFFPILKDPVISTFTCIAILWIFVFLNIIGPHVITRVQAVATTLALIPIVAVAVFGWFWFNGSTYMDAWNVSGMDTFSAIQSTLNVTLWSFIGVESASVAAGVVKNPKRNVPIATIGGVLIAAVCYVLSSSVIMGMIPNANLVISSSPFGDAARLALGDTAGAIVAFCAAAGCLGSLGGWTLLAGQTAKAAADDGLFPKVFAKVNKAGTPVVGLLILGVLMTVVQFSSISPNAAKEFSLVSSVSVIFTLIPYLYTCAALLLLGHGHFGQEKGRYIAITFIAFVYCIWAVVGTGAKEVVWTLVAMMVITAMYTFNYNTKHPAPFPLEKKD

SEQ ID NO: 5509 - protein, 142 aa, Xenorhabdus sp.
MYRTILLPVDISEDELTSKAVHCALNIARETGAKLHILHVLPISSAIINAYALGYMEIKDKATITAEKDLGKLVASIDLPAERISYSIAFGSPRDEITAMADELGADLIVIGSRRPNITTHLLGSNSAAVVRYAKTSVLVVR

SEQ ID NO: 5510 - protein, 145 aa, Xenorhabdus sp.
MYKTILVPIDIAEDHLTDNALKHAEFLAKISDAKVHLFHSVPDISRFSVSYSYHYDLLSAFAKKAIANSEEELKKVVEKINLPKDKVSFSVAFGSPRDKVLSTAREIGADLIIVGSRRPDISTHLLGSNASGIVGYANISVLVVR

SEQ ID NO: 5511 - protein, 116 aa, Xenorhabdus sp.
MLETDNVTTSDIESYFSHDYIQVANGNELLFNDFVSHINVLKEALISTNINILSIAENGNNVHTHHLVKVVKKDGTHAEFEVFARFLLSEGKITHCYELTRKIIGDEQDDDLGYRK

SEQ ID NO: 5512 - protein, 284 aa, Xenorhabdus sp.
GTLYCGCDWQWVGKSGGRVDLPSCNYHVRSQQNRAERIEWEHIVPAWVFGHQRQCWQNGGRKNCVDSDPAFRVIESDLHNLAPSIGEVNGDRSNLGYGMAAKNLPNMYGACSSKVDFKSRLFEPRDKVKGMVARVYFYMHDRYNLTMSRQQQQLMMAWDRQYPVEAWERERDNRIARIMGHHNPFVTGSKKWQLGHKNSGQGVTGQADSRNVNAVRSISEPVSVTKSTAKSAANEAIKGNKNSMIYHLSHCSGYKTTSEKNAVYFRSESEAQKAGYHLAANCKK

SEQ ID NO: 5513 - protein, 45 aa, Xenorhabdus sp.
VKKYSGNEEVTINTINTSENNLQIQVIIAGKNQLDITLNSFSDEQ

SEQ ID NO: 5514 - protein, 270 aa, Xenorhabdus sp.
VKYVMEWSLLGPEVYGFLFLVALVAGFIDSIAGGGGLLTIPALLSTGITPVQALATGKLQAVGSSLSASLYFIRRGIVSLRSQRFAITMTVLGGMSGALLVQFVSPDLLRYALPVLVMIIGLYFLLVPNIGAEDRPRRLGPIAFGCLAGGGIGFYDGVFGPGTGSFLALSYVMLCGYNLAKATAHAKVLNCAANLGALVFFILGGQVLWLLGFVMLAGQMIGARLGAGLVLSRGQKLIRPMLVTISFLMSIKLLHEQHGETIRSWLAFYF

SEQ ID NO: 5515 - protein, 361 aa, Xenorhabdus sp.
MAGNSIGQFFRVTTFGESHGLALGGIVDGVPPGIVISEADLQIDLDRRRPGTSRYTTQRREPDEVRILSGVFEGVTTGTSIGLLIENTDQRSQDYSAIKDVFRPGHADYTYEQKYGLRDYRGGGRSSARETAIRVAAGAIAKKYLFEKHGIRIRACLTQMGDIHCEMKDWDLVEQNPFFCPDESKLTQLDKLLRALKKEGDSIGARVTVVAENVPAGLGEPVFDRLDADIAHALMSINAVKGVEIGDGFGVIGLRGSENRDEITSQGFTSNHAGGILGGISSSQPIVAHIALKPTSSIMVSGKTINRQGEEVDMVTRGRHDPCVGIRAVPIAEAMMAIVLMDHLLRQRAQCADVSPSLPSW

SEQ ID NO: 5516 - protein, 314 aa, Xenorhabdus sp.
LEVLVDKIFVDEAVAELHTIQDMLRWATSRFSAAGIYYGHGTDNPWDEALQLVLPTLHLPIDIPENMMTSRLTTTERHRIAECVQRRINDRIPIAYLTNRAWFCGHEFYVDDRVLVPRSPIGELINNQFAGLLPQEPSTILDLCTGSGCIAIACAYAFPEAEVDAVDISADALAVTEQNIENHALLHRVIPIRSDMFRDMPPMKYDLIVTNPPYVDEEDMSDLPDEFHREPELGLAAGVDGLDLVRRILATAPDFLTEEGVLICEVGNSMVHLIGQYPDVPFTWLEFEHGGGGVFMLTRSQLVEYHEHFHLFKD

SEQ ID NO: 5517 - protein, 452 aa, Xenorhabdus sp.
MQNTSQLKRGLSVRHIRFMALGSAIGTGLFYGSAGAIQAAGPAVLLAYIIGGAAVFMVMRALGEMAVHNPVPGSFSHYASHYLGPLAGFLTGWTYVFEMLVVCLADVTAFGLYMKFWFPHVDQWIWVLGIVFFIGAINLCNVKVFGEMEFWLSIIKVVAIIAMIIGGFAIMMYGFEQGTGLSNLWEHGGFMPNGVTGIIASFTIVMFAFGGIEVIGITASEAKNPVYSIPRAINAVPVRILLFYVLTLFVLMCIYPWNQVGQNGSPFVQIFSSLQFNYAAHILNLVVITAAISAINSDIFGAGRMMYGMAQKKQAPAFFNKLTKHGVPWVTVLVMSAILLVGVWLNYILPEEIFLIIASIATFATVWVWLMILLSQYMMRRKMPAEEAKQLQFPVPFWPIAPMLTIAFMAFIILVLGYFPHTRVALYVGLGWVALLTACYFLWVKTSGEKKA

SEQ ID NO: 5518 - protein, 156 aa, Xenorhabdus sp.
NMSQLPPFLVKNSGVNSGFMIAQVTAAALASENKALAHPSSVDSLPTSANQEDHVSMAPAAGRRLWEMADNVRGILAIEWLTACQGIDFREGLKSSPTLEKARHILRNKVKYYDKDRFFAPDIEAAIQLLAEQQLSALLPADKILPIGNILRNHIN

SEQ ID NO: 5519 - protein, 409 aa, Xenorhabdus sp.
HDSHLIKNIKVYEEGGMFLSKESFSDEEWNDPKFQLRNLIKTSEGLEKWVALTDGERKAIEAVKGKYLWQSTPYYASLMDKHDENCPIRLQTIPHLREMNVAENSDNDPVGDTANLKTARVVHKYPNRIVLLVSDTCPVYCRHCTRKFHTTDVGGTYFGSDLAASYEEDFAYIESHPEIDDVLLTGGDPLIHYDKFLEAIIKRLRSISHINIIRIGTRYPVFAPQRVTEKFCQMLEKYHPIWVNTHFNHPKEVTEEAAAACDRLLRHGIPVQNQSVLLKGINDDVETMRSLLKALLRIRVRPYYLYHCDNVSGVSHFMTTLEKGQEIMDAMVGFETGFSVPQYVVTTTLGKLPVNRAHVTAHEDGRVTARNYKQDSLDITEYIKPPSDLNDYPAEYRNSEIIPSKTVDL

SEQ ID NO: 5520 - protein, 383 aa, Xenorhabdus sp.
RIAGRAKNINASVTVGLADIVAKLKSEGRDIIGLNEGELDFSTGAAIVNDTIRALIDGRTRYSWLNGEPELREKICQKVFEDNRIKATPENVIVTNGSKQVIYEILQTVINPGDEVIIPVPCWATYLEAVKLAGGKAVLIENIGVDLDVEKIKQAITENTKLIIINTPNNPTGAVYSKAALQTLCQIVKEKQIFMLSDEAYEQIVFDGEHHSLAALDDNEYIITVQTFSKSFAMTGYRIGYMIAHPELINRVSDLHGHMTDNVCTFAQYGAIASLEMPKDFYQERLEILKQRRDRAYRYTRELFDCELPAGAFYLFPNVEKYLNDRCRDATQFCEYLLTHAGVALIPAEACLYRGHVRVSFAAPMDAIEQGFERIANVLRYTQ

SEQ ID NO: 5521 - protein, 320 aa, Xenorhabdus sp.
MNQAIYSIELSNSEVDEIQALIANLQERYHSTDDQAFVHSLPEWVESLPTRLRIEVKKFRHQGYPLAVIKGYPDMSESMGATPNHWKDVSNTNGHYDYYCCLMSSLCGDVVGFSDLQDGKLVQEIFPIQQDAGKQLGTGSVDLLLHTEDTSLDYRADYLGFMCIRNIYRIPTSVSVPDFSKLSEKTVTILKKNKFRIFNDRPCLSKEERDENYTVCPVLTGSGDHIHMRYDPLYMDKAALDTEELEAVAELEALAESAVFDLVLSPGEIAFIDNYRCAHGRKAYQPRYDGTDRWLKRTQILTRLRDFKHLSLPGRINVLP

SEQ ID NO: 5522 - protein, 149 aa, Xenorhabdus sp.
KIKIRSAETEDAEHFQRIFGHPDVYFYTLQRPCPSLEMWRERLKNNREQGVFDFVAEIDSNVVGTLGLYSYPNPRRKHVISLGIGIDPDYSGRGIGSEMMAFAIDYVFNWLGCIRIDLEVFIDNEKAIALYTKFGFEMEGIQRKAALKQ

SEQ ID NO: 5523 - protein, 66 aa, Xenorhabdus sp.
VSMLVGKRIQMKRKELGITAAELADRIGVSHQQLSRYERGTNRISLEHLVVVSITLKTPASFRAHG

SEQ ID NO: 5524 - protein, 248 aa, Xenorhabdus sp.
VNTTTSGKQTITTMELIEWTEEEGIENPCYNKPQCYVGPDVQYNNGKQPGMYGSCIDAKVCLTDAHKYRTTADVMRAYKSQLGIPKRVTFPIITANAQCVGLFYTNQISSGYGTAQKFPNSTCNKLPPANQSCELIVPVEIAYGELKASEVNNATRSINGQFSCALYSNKIMLQVKSINNEPKVYLDANKQIYSALQIDGKNAADGVNVTAEGKYIPSTFTLTSTLHTLIQPKAGKYEGTAVVLLTYL

SEQ ID NO: 5525 - protein, 167 aa, Xenorhabdus sp.
VSNLQNAYAQDNLRQNVRITMTVLAPSCVIKPEDKAMEVDFGSITSRDLYLYQRTPSQPFRLHLEECDPKVAQKVNIKFVGQESKEQPGLLAFSHGSNASGAAIGMEKLDGTPLPFNKTAQFSLAGTNSSHVIPFQAYVKADPKALLQNKIGVGEFNAMATFELSYE

SEQ ID NO: 5526 - protein, 252 aa, Xenorhabdus sp.
MKLKKILMIAAVTVTSLMSVHQATAAIALDRTRAIFNGNEKSVSLNIENQHPDLPYLAQAWIEDEQGNKINSPLVVVPPVQRIEAGMKSQIKIQTLPAIAQLPLDRESLFYFNVREIPPRSEKSNVLQLAIQTKIKLFYRPEAVIARRVDLENPWQEKLTLTRQGNQYVLNNPTPYYVTIAEGQSQVKGKPVEGFKPFMLAPKSSETLGGTASAFGSNPILTYVNDYGGHPQLVFSCSGNNCTVTKILDEEG

SEQ ID NO: 5527 - protein, 559 aa, Xenorhabdus sp.
RGYSAEVTGVARTNAKVTISQMGRVLYETQVSAGPFRIQDLSDAVAGTLDVRIEEQDGGVQQFQVNTATVPFLTRPGRVQYKFIGGQSTNEKHRREGPAFGLGEFSWGINNGWSLYGGLLAAGDYDALSLGIGRDLLMFGALAFDVTGSRAKLPGENKTLTGGSYRLSYSKRFEEYNSQLTFAGYRFSERDFMSMGQYIDRRYRSRNISSDSGKELYTVNLNKQFNELGFSTTFSYSHQTYWNRPANNRYDLSLSKHLDIARYKGIYVNLSAYRNNFDNKKDDGLYLSLSIPWGETGTVSYNGLVNRQGNGHTVGYFNRIDDRNNYRISTGVNTRGRATVDGYYTHYGDEALVTASASHQSDSNTSATLGLQGGITATGKGIALHRTNIAGATRLMVDTEGVRNVPVQTYGSSVHSNYFGKAVLADVNSYHRNTANIDLDKLPDDVEAMRSVQLATLTEGAIGYRKFQVISGIKAMTVIRLPDGSFPPFGASVMNASQREIGMVSDDGYAYLSGMKKGEKLQIHWDGHAQCEVTVPDDISSEYSTAFLLPCQFLNVNDK

SEQ ID NO: 5528 - protein, 42 aa, Xenorhabdus sp.
MSKHTPLYEQHLACGASMVDFHGWMMPLHYGSQIDEHHSVRT

SEQ ID NO: 5529 - protein, 410 aa, Xenorhabdus sp.
MQSFDVVIAGGGMVGLALACGLQGSGLRIAIVEEHPPTGKFHTNDEHALRVSAINAASERLLTHLGVWQKILAMRASPYQGMEVWDLDSFGRIQFSAAENGLSHLGHIIENRVIRQALWEQVESLSDITVYSPASLRNVAWGENEAFITLSDESMLTSRLVVGADGAHSWLRQHADIPLTFWDYEHHALVATIHTAEPHQGVARQVFHGDGILAFLPLSDPHLCSIVWSLPAEAAKQRKAMDTELFNRQLSATFDMRLGQCELVSERQTIPLMGRYARNFAAHRLALLGDAAHTIHPLAGQGVNLGFMDVAELIGELNRLNQEGKDIGQYLYLGRYERRRKHSAAVMLAGMQGFRQLFDGNNPVKKLVRDVGLAMADRLPGVKPQLLRHAMGLHDLPDWLMTQSDSVEKF

SEQ ID NO: 5530 - protein, 398 aa, Xenorhabdus sp.
VIMSVIIVGGGMAGATLALAISALSRGQLQVSLIEAAEPAQEHPGFDARAIALAYGTCQRLNQIGIWSALKDCVTPITHVHVSDRGHSGFVNIRADDYNIPALGNVIELHNAGSRLFGLLKQAPNIRLYCPAKVNSVERFDSSVSITLDNGEKLTGKLLVAADGSQSTVASACHIPWQRQNYGQAAIIANVLTSEKPQGRAFERFTKHGPLALLPMSEGRSSLVWCHPSEKLPEISQWEDSEFLHQLQKAFGWRLGKMLETGQRHCYPLALSTAGQQISHRLALVGNSSQTLHPIAGQGFNLGMRDVMALAQVISEAAIEGLDIGSYNVLARYRQQRDIDREVTIGITDGLVRLFANDYFPLKAGRNLGLMAMEMLPLTKGTLARQTLGWVNHHSTAE

SEQ ID NO: 5531 - protein, 97 aa, Xenorhabdus sp.
ISRKHIAQAIIDTCLKINALGLNQGTSGNISARYQDGFLITPSGVPYEKLTPEQIVYINYSGEAEPDKIPSSEWHFHLSCYEARPELNAVVHNHAVN

SEQ ID NO: 5532 - protein, 104 aa, Xenorhabdus sp.
SQNNFCISSGACCAFFRVSFYWAEAEDGGGTVPVAATEKLNDFMCCMKGTNESHPRCINLQGKVGHSVSCTIYDKRPSPCREFSQAWETDNYNEACDRARAAHG

SEQ ID NO: 5533 - protein, 405 aa, Xenorhabdus sp.
ESLPHYLAKNLPATISLGGLPETWQIQEVGDGNLNLVFIVAGTEKTIVVKQSLPYVRAAGESWQLSLVRTYFEYHALLEEKKFAHQYVPDVYFYDEEMSLFAMEYLDKHIILRNRLISGEKFPHLAKDIGIFLADTLFHTSDIGMDSTEKKELVSRFANNHELCKITEDLIFTEPYFNAERNNWTSPQLDNDIHAIWQDQAMIQTAMRYKYKFMTETQALLHGDLHSGSIMVTPDSTKVIDPEFSFMGPMAFDIGNYIGNLFMAYFAQPALRENIEQCADYQSWLFMQLETTWEIFERRFRQLWNEKTTGEAYPVTIYQQGTFNSSFLKTAQDDFFSNLFEETLVYAGLEINRRIIGFAGVADFKQIDDPTLRASCEKQALKLARELIVNKHKYQNFSQIKHHMT

SEQ ID NO: 5534 - protein, 101 aa, Xenorhabdus sp.
ALKQSPPADFVVADKGYDSQALRTYIEEQGATAVIPYRKNSRNSDKKWDKDLYRYRHLVENAFARIKHFRAIATRYDKLARNYASTLALAFIIIWLPMWVE

SEQ ID NO: 5535 - protein, 207 aa, Xenorhabdus sp.
MNKLIKPVNSFNKIIDVLLPSSEEVLSDLPTQGSLIKIENEFAKFFLLVKGYVNIRRIEDNLIISTVFSPYILGLSFYSGSETYYSIELGPDCKIYQLPRVSALNAIKKHDLYREWMRVISYKMAFLYARDMSIFRHGAKDIVCSLLSRLITLPDEFRENISAIKYIEQRCTLSRSCIQRILASLKKSKNIEIIDGYLVKVVFLPTE

SEQ ID NO: 5536 - protein, 401 aa, Xenorhabdus sp.
QPSHVDQIKQINLGLVYGLIDQYGPISRIALSKKSQLAPASITKITRELFDAHLVKEVEFPDLGFRGRPAIGLKTDSKGWQFLCIRIDKDSTVFGLRDLGNNLIVEEELSLAASENHSFLNCLAELIDNFFFRHQSHLERLTAISVTTNGIIDPINGVIHNSPHYSIQSLPLSTFLYRRIGVPVFLQHGITAWTIAESLYGAGKGCQNIIQVVIDDNVGVGIMIAGKMLHAGNQSVVEIGHTQVEPDGERCYCGNTGCLETVVGIKNILLKARELASQYPGSLISPATPLTVEFLCLAANQGDPLATEIIRGVGERIGHIMAIMVNIFNPDKILIGSPLNEAKHILYPVIQQKITQLSLPGYSQRVNIAATAFANSGTLPAASLIKQSLYSGHLLLEIMQG

SEQ ID NO: 5537 - protein, 183 aa, Xenorhabdus sp.
MLTRLFVTGTDTNIGKTVVTRALLQFFNHEKEIAVGYEPITGEGTSVDFAQMTDCLNKLSHKADRVIVDGNGGWRALLQDNSFYSDWVVKEKLPVILVVGIQTGCVNHAILTAQSIISDGVPLLGWIANRINPGLAHYAEVLERLRCHIPAPQLGEIPYLLRPEERELSHYLDSTVISTFDHL

SEQ ID NO: 5538 - protein, 94 aa, Xenorhabdus sp.
MTAATSFVTQASQDQNLQSNVVTNKVVTCDVLTEQIAQKIINNGVKQADFKLEVIDNDQAVNSDEKVVGSCNRGKQKIIYTRLPHANDESQSTH

SEQ ID NO: 5539 - protein, 108 aa, Xenorhabdus sp.
IALLLLLFWQTPALSRSNPCTSDNCVIINGGSENSMTRETARQDREEWNAQRDLRNKINKRKEKRFEEYENDVDNEDACLKNFNLNAYWEPKTKRCLDVNTGRPINPK

SEQ ID NO: 5540 - protein, 232 aa, Xenorhabdus sp.
ARKFIEHGSIVIATGRRKERLDKLREELGENFYPIQLDVRDRAAIEKVMQDLPDNLRNIDILVNNAGLALGLEPAHQANPDDWETMIDTNTKGLVNMTRALLPNMVKMNHGHIINIGSVAASWPYAGGNVYGATKAFVKQFSLGLRADLQGKKVRVTDIEPGLVGGTEFSQVRFKGDGEKVNKTYEGADALTADDVAEAVFWVANLPGRVNINTLEMMPVCQTFAGLSIHRA

SEQ ID NO: 5541 - protein, 159 aa, Xenorhabdus sp.
RNVMGLTNIEVMIPFVRTVAQAKAVVSELASQGLKRGENGLKVIMMCEIPSNALLAEQFLEHFDGFSIGSNDMTQLALGLDRDSGVVSELFDERNDAVKQLLSMAIQAAKRQGKYVGICGQGPSDHEDFAEWLMKEGIDSLSLNPDTVVKTWVSLAGNN

SEQ ID NO: 5542 - protein, 1022 aa, Xenorhabdus sp.
MIPRIPQAPRVSELVKEYLTVLKEAGFTGDTASNYADRLTMATDNSIYQLLPQAVIFPRSTADVALLARVAGEERFHSLTFTPRGGGTGTNGQALNNGIVVDMSRYMKRILEINPEQGWVKVEAGVIKDQLNQYLKPFGYFFSPELSTSNRATLGGMINTDASGQGSLVYGKTSDHVLGVRAVLLGGEMFDTRPMNTTLAESIAKENSTVGHIYKTVLERCREQRELIIEKFPKLNRFLTGYDLRHVYSDDLQSFDLTRILTGSEGTLAFITEATLDITPLPKVRRLVNVKYDSFDSALRNAPFMVEAKALSVETVDSKVLNLAREDIIWHSVKELITDVPDKDMQGLNIVEFSGNDEQQIDQQVSTLCQRLDELMVNNQAGIIGYQTCHHLDDIERIYAMRKKSVGLLGNSKGAAKPIPFVEDTCVPPQHLADYIAEFRQLLDNHQLNYGMFGHVDAGVLHVRPALDMCDPQQEMLMKQISDEIVHLTAKYGGLLWGEHGKGFRAEYSPAFFGETLYDELRRIKAAFDPLNRLNPGKICPPMGIDAPMMKVDAAKRGTFDRTIPVNVRSTFRGAMECNGNGLCFNFDVKSPMCPSMKISQHRIHSPKGRATLVREWLRLLTEQGVKPELLEHGLDQSRPSLRGLIEKIRYSWQAWRGEYDFSHEVKEAMSGCLACKACSTQCPIKIDVPSLRSRFLALYHSRYLRPLRDHIVANVEGSTPLMAKAPRVFNFFLRQPWVQKLSQQIIGMADLPRLSYPTLQQQLAGHYAVGTTLEQLETLSSSQRKQHVLIVQDPFTSYHDAKVVTDFVRLVEKLGYQPVLLPFSPNGKAQHVKGFLNKFAKTARKTADFLNRAAQLDIPMVGVDPALVLCYRDEYRDILGEHRGNFNVQLVHEWLVNILPEIIPTEKRDNVTPNHDWYLFGHCTEVTALPNSGKQWSDIFHHFGGNLNSVNVGCCGMAGTYGHEKKNLENSLGIYRLSWAPALSHFALEHCLSTGYSCRSQVKRIEGKVLKHPLQALLEIV

SEQ ID NO: 5543 - protein, 142 aa, Xenorhabdus sp.
VIQKQHIWKRSADVSMLNQLRNDCMLEYVGIEITRLGDDFLEGTMPVDQRTKQPFGILHGGASVVLAESLGSLAGYLCSEGEQKVVGVEINANHIKAVRDGIVRGVCKAIHLGRSHQVWQIDIYNGQQQLCCTSRLTTAILS

SEQ ID NO: 5544 - protein, 352 aa, Xenorhabdus sp.
RFLTFISTFLIGMLSFCGIANMAYAVEYPLPPANSSLIGENSIYVVPNDGLPLEAIAAKYQIGLLAMLEANPGVDPYLPKPGTKLVIPSQMLLPNTPRQGIVINLAEMRLYYYPKGKDSVIVYPIGIGQLGRNTPTMTTSVSQLIKNPTWTPTTNIRKDYASRGIILPAVIPAGPDNPMGNFALRLSAGRGEYLIHGTNANFGIGMRVSSGCIRLRPDDIKALFHNVPRGTRVQIINEPIKYAVEPDGKRYVEVHQPLSKTESDDPQTMPIKRTEGLLKFIGNKGTNVVLVDQEIIRRSGIPVAVNEKGASSSHREKEISHLVEEREDETLNVQPVKLPPLNQPTPVYQTKS

SEQ ID NO: 5545 - protein, 82 aa, Xenorhabdus sp.
GIVMNRTKIVLGAVILASTMLAGCTSTAKKVDQLSSQVLTLGSKVDQLSNEVGSMRSDVQTAKDEAARANQRLDNQVRSYKK

SEQ ID NO: 5546 - protein, 375 aa, Xenorhabdus sp.
MRFMINQLETWDENNRPLFGKLYSALESRLMQSGGWNAVVPQNISVSPSHDIGLSTGAKSGPSIAIQPIQSGRELLDQAKSLAHYLRNQPQGWLSAHRLMKSVRWDTIHQCPPQDTQGCTRLAPPRTDARAQLKRLYMQQSWGELLEQADRLFAEGVNHFWLDVQWYLYQALSKSGAPWDGWADIIKQDLKLLLQRLHGLEKLAWNDGTPFADDVTASWIMQKVLDEGKGWSDPSISPGVVVEEDDILSLEAEAIAQADSDGLEKAMAWLQSRPAVTTPRQRWMMRLLMSRVAEQFGRNDLALHLLSELDTTAGTLTLVQWEPELAFEIKARRLQLLRAKSQRNSTDKTVMAQQLDELLAELVRLDPVRSVVLYG

SEQ ID NO: 5547 - protein, 587 aa, Xenorhabdus sp.
MDDLTLRYFDAEMRYLRESAREFAQAHPDRAALLDLDKADTPDPFVERLLEGFAFSMGRLRQKIDDDLPELTEGLMSLLWPHYLRTIPSLSVVEISPDISQMKMEEVVPEGFEVLSQPIGPKQAVCRYRTTQELHLHPFTVSNVHISTEPDGRSVLRIRFNCGEQAEWSQVDLSRLRFYLSGDAQISAALHLALTKRQSAIYLRLPEVMDRIRFDGYFSPGGFTDNDRLWPKGDTSFSGYQLLLEYFTFRQKFMFVELNGLEGIRFPDKTRWFELDIVLSELWDSDFLVKTEHIRLHCISVINLFTLEADPLTVNGLENEYLLRPRRLQDGHTEIYSVDGVNSSRHAEEGAYVPFTSFRHRGGMLRRTAPERYYHTRVRRGVTGLHDTWLILGGQVWENNRNITSETLSLQITGTNGQLPRKALQSTLLNRCEQTLQLPVRVQNLCKPTLPAYPPAEDRFHWRVLSHLGSSFLNMMASAEVLRGTLALYNWQEDEMNNRKLDAIVAVRHEHLQRFEKGFLLRGIDIEVTLDSNGFTGEGDIHLFGEMLNRFFSLYADIHLFNQLTLIIQPSGKCIRWTENHNQNLPR

SEQ ID NO: 5548 - protein, 405 aa, Xenorhabdus sp.
MDRESQPELTALITQLKDKLPLVNFYRFCQLIESLKPEKSGLGSTTNPDDDPVRFRPHPGMGFPVSELKTIETGHEAHDNKPSVRTTFLGLYGVESPLPSAYIDDIAQQREGTEAVTDFLDLFNHRLTTQFYRIWRKYSYPATFKAGGSDETSQYLLGLIGLGIQGCANHIGTPVSRFLALLGTMRLPTRTSEGICSLINLLAPNTKVEIIRHDRRRIAIDNPVRMSCHSPVSLSHKPVLGRSGIDVNSQILLILKTQDPEEVRQWLPPDGQLHADLMTLLHAYLGSRVHARLQLRIPRELLPEAQLSVTTGQGVKLGQTAVMRRLSPVTANDTVINQTITHRVIVGNVIIDKTNTGKTAGNNAAINRTSTNKKVNEITIGLGRYQAAPEQLFRKETHEYGNYRF

SEQ ID NO: 5549 - protein, 160 aa, Xenorhabdus sp.
MCVTGCGLTQTIGDGSAEVTRSIFYKKIKEVHLDFQVRDGSNLNDNGIALSTMVRIYQLKDRRAFDLIEYQNIFTDDINTIQSDVLSEKDLQLRPGESYSLDMSLEKGAQYVAVVAMFHSPDLTKNNWQIVIPKTSLDPDKARQVELKNQTIHLLPLKKD

SEQ ID NO: 5550 - protein, 139 aa, Xenorhabdus sp.
MLTGNFSGGLDVHQVSEENQVILSVLDNIQRIINTRAGTLAHLPDYGLPDMSKIMQGLPGTAHSLTNILSSTLLKYEPRIKRLSLTLLPEHEFGTLRYALEAELHEVGLVRYGTEFIPGGRVLIRHLKKQNFLESKYQS

SEQ ID NO: 5551 - protein, 454 aa, Xenorhabdus sp.
MNTTSEKYLKTGEDPRTFPDFTALRDELNKLHHPARPDVNWEQAERLCLSLFSQNGVELQTAAWYTLIRTTRAGLVGLNEGLAIIHGLVTHQWQAIWPQQVHARIEILAGLSQRSINSLRIQTFVYTDLPRLYQAEQYISQLCQTLQLLELKHVSQLERLGTFIHNVAVRLETLEGANIDTSLEQPPIPSPNTSQQTWVYVAKPEEESQSNIVMPPPEKPGFQWKGFALGVLIALVFSGGGIGIWQYATQDKVDPRLQSTVASLPEILTEDVLFSLGAQSDKEHGENSVILDKTKRQLKMLESLSPVWQQDYGFSLVHQSKVLWPQSPLSAELSAQWNKQVTMNAASIDSLGHWHSGMDQLAELTRRLNWLDEKRGRYITGSELKSVVFSLTQTFNKNPPLEEKLRQLEETAIKEELSPALIQQTDMHFIQLLNRYALIKQRRIQRQSALKIGH

SEQ ID NO: 5552 - protein, 31 aa, Xenorhabdus sp.
MDNARKILCQLVVQKELNIVVKLTLISFQGQ

SEQ ID NO: 5553 - protein, 50 aa, Xenorhabdus sp.
MLGIFGDLPAGISDGVALVCEQNRTDIRVNGGNEVIGDSSDINHFSPFRV

SEQ ID NO: 5554 - protein, 64 aa, Xenorhabdus sp.
VINQQGQYIYAYAKGQISAIRRSKQKGSDRMKFAAYGEDEVSEWNVTKVIESYPSWVKVLLWRQ

SEQ ID NO: 5555 - protein, 155 aa, Xenorhabdus sp.
VMKGGDKIRAALALLAGTQSIEVRAGVLAGATNEKTGEPIAPYAAANEYGTRNIPPRPFMRSTIANQSDEWGRVLGAQLRGRLQESGGIEAAFETVGKIMVDDIKDSIEQSLPPPNAPATVARKAKKGIASPDKTLVDTGSMQRAIDYEVIKNGE

SEQ ID NO: 5556 - protein, 137 aa, Xenorhabdus sp.
MAIVTFDSGAFLELYPRFAGVLTKGQLQQAFDVACLLLDNSDNSNIPYEPDGTQERKTLLYLLTCHIATVALWGNNGQAGPAASATEGSVSVSFAVPDAANASWFKLTPCGQMYWQATRKYVVGGRYSAVKHYHPWG

SEQ ID NO: 5557 - protein, 125 aa, Xenorhabdus sp.
FFISEKSSMSKGKTVSVRLNHPHGIEFPMPDGSSVVLKGNAFYLFGQEKGKLPVGLFGETRVDADKWDYILTHYGEMEIFKNQLCVWDEKTTSANDKASEKKELRHGREPVDTSKTATEPVKEST

SEQ ID NO: 5558 - protein, 588 aa, Xenorhabdus sp.
IMMTQTYIPGKDAALEDSIHNFQQKLSTLGFNIEEASWLNPVPNVWSVHIRDRDCPLCFTNGKEPSKKAALAFALGEYFERLSTNYFFADFYLGKAVVQGVFVHYPNEKWFPLPEDDSLPTGILDEHLHRFYNPDNELYASQLVDLQSGNEERGICALPFTRQSDNETVYIPMNIVGNLYVSNGMSAGNTKNEARVQGLSEVFERYVKNRIIAECISLPEIPQTVMDRYPGVVASVNKLQEEGFPLYCYDASLGGQFPVICVVLFNPNNGTCFASFGAHPEFGVALERTVTELLQGRSLKDLDVFTAPTFDDEEVSEHTNLETHFIDSSGAISWDLFKQDADYEFADWNFSGTTEEEFATLMGIFNTLSAEVYIADYEHLGVYACRILVPGMSDIYPVEDLHIANNTMGTHLRDTILALPDSQWQPEEYLAFLEQIDEEGLDDFTRVRELLGIASGKDNGWSNLRIGELKSMLALAGNDLEQALIWVEWTQDFNSSVFTAERANYYRCLHTLLLLTQEEDRNPSQYYQAFVKMYGQDTVDAASSSLTGKNCFHGLWSVDSELKALPAHQALLNAYEKLQKAKRTFWCK

SEQ ID NO: 5559 - protein, 283 aa, Xenorhabdus sp.
MKTDDTFNLFPPAVMAQIADDSGVYKVNKNPAVTYLSAIMAGVFISIAFVFYITATTGTSSIPYGLAKLTGGVCFSLGLMLVVVFGVDLFTSTVLSIVSKATGRITWSQMFRNWLHVYIGNLIGALFFVTLMWLSGQYAVANGFWGLNVLQVADHKMHHTFVEALCLGILANLMVCLAVWMSYSGRSLIDKLSALILPIGMFVASGFEHSIANMFLIPFGIVIKEFAPTEFWEKVGATPEQFPQLTISNFITDNLIPVTIGNIIGGSILVGLTYWFIYLRGSR

SEQ ID NO: 5560 - protein, 699 aa, Xenorhabdus sp.
MSELNEKFSVAWQGFNEGNWQNEVNVRDFIQKNYTPYEGDESFLAGATKATDILWEKVMEGIKIENRTHAPVDFDTNVASTITSHDAGYIEKTLEQIVGLQTEAPLKRAIIPFGGIKMVEGSCKAYDRELDPKLKQIFTEYRKTHNQGVFDVYTPDILKCRKSGVLTGLPDAYGRGRIIGDYRRVALYGIDFLRDEKYAQFTSLQEKLENGEDLEATIRLREEISEQYRALGQIKEMAAKYGYDISAPATNAKEAVQWTYFAYLAAVKSQNGAAMSFGRVSSFLDIYIERDIHAGKLTEQDAQELIDHLVMKLRMVRFLRTPEYDELFSGDPIWATESIAGMGLDGRTLVTKNSFRFLNTLYTMGPSPEPNMTILWSEKLPANFKKYAAKVSIDTSSLQYENDDLMRPDFSSDDYAIACCVSPMIVGKQMQFFGARANLAKTMLYAINGGMDEKLKMQVGPKEEPIKDDVLDYDTVTERMDHFMDWLAKQYVTALNIIHYMHDKYSYEASLMALHDRDVHRTMACGIAGLSVAADSLSAIKYAKVTPIRDENGLAVDFKIEGEYPQFGNNDARVDDIACDLVERFMKKIQKLQTYRNATPTQSVLTITSNVVYGKKTGNTPDGRRAGAPFGPGANPMHGRDQKGAIASLTSVAKLPFAYAKDGISYTFSIVPNALGKNDDVRRANLAALMDGYFHHEAS

SEQ ID NO: 5561 - protein, 341 aa, Xenorhabdus sp.
MQSLTLQPISHIHGTINLPGSKSVSNRALLLAALAQGTTCLTNLLDSDDIRHMLNALTALGVAYRLSEDRTTCEVDGIGGVITDKNELELFLGNAGTAMRPLAAALCLGNNDVVLTGEPRMKERPIGHLVDALCQAGAKIDYLEQENYPPVRIRGGFSGGKVTVDGSVSSQFLTALLMAAPLALNDSEIDIKGDLVSKPYIDITLALMNSFGVTVENDHYQVFRIKGQQKYQSPGHYLVEGDASSASYFLAAAAIKGGTVRVTGIGKNSLQGDTKFADVLEKMGATIRKGDDFVECERGTLTGIDMDMNAIPDAAMTIATTALFAKGETVIRNIYNWRVKE

SEQ ID NO: 5562 - protein, 365 aa, Xenorhabdus sp.
VELMSQVYNFSAGPAMLPAEVLRRAEQELCNWHGLGTSVMEISHRSKEFMSVASEAEKDLRDLLSIPENYKVLFCHGGARGQFSALPLNLLGDKTSADYIVGGYWAESAAKEAAKYCTPNVINILTETDGVKSVKPMNEWDLSNDAAYVHYCPNETIGGIAIFEEPDFGDDKIVVADYSSTILSAPIDVSRYGVIYAGAQKNIGPAGITVVIIREDLLGKAHKHTPSILDYTVQVNNDSMYNTPPTFAWYLSGMVFKWLKEQGGLQEIKKRNHAKAKSLYHAIDNSDFYINRVAPQNRSIMNVPFQLANPALDGKFLEEAYAHGLHALKGHKVAGGARASIYNAMPHEGVMALVEFMADFERRNA

SEQ ID NO: 5563 - protein, 347 aa, Xenorhabdus sp.
MKSIKKTAIASFLALVSGSAFALPNITVLATGGTIAGGGESATKSSYTAGQVGVDSLLNAVPAIKNIANLKGEQVVSIGSQDMNDQVWLTLAKKINADCDKTDGFVITHGTDTMEETAYFLDLTTQCHKPIVMVGAMRPSTALGADGPLNLYNAVVVASDKDSANRGVLLAMNDSVIHGRDIGKLSTTEVQAFQAVNAGPQGFIHNGKVNYYSAAPVKADKAVFDVSKLTELPKVGIVYNYSNASDLPVKAFVENDYKGIISAGVGNGNIYKSILDSLSQAAKDGVVVVRSNRIPFGFTTQNAEVNDSKYGFVASERLNPQKARVLLQLALTQTADTAKIQEMFSKY

SEQ ID NO: 5564 - protein, 473 aa, Xenorhabdus sp.
KKLYIKTWGCQMNEYDSSKMADLLETTHGYQLTDIAEDADILLLNTCSIREKAQEKVFHQLGRWKGLKDKNPEVIIGVGGCVASQEGDYIRQRAPSVDIIFGPQTLHRLPEMINHVKGTRSPVVDISFPEIEKFDRLPEPRADGPTAFVSIMEGCNKYCTFCVVPYTRGEEVSRPCDDILFEIAQLAAQGVREVNLLGQNVNAYRGATFDGDICTFAELLRLVAAIDGIDRIRFTTSHPIEFTDDIIAVYEDTPELVSFLHLPVQSGSDRILTLMKRAHTALEYKGIIRRLRKARPDILISSDFIIGFPGETQDDFEKTMKLIADVNFDMSFSFIYSARPGTPAADLPDDVSEDEKKQRLYLLQQRINQQAMSFSRAMLGSTQRILVEGPSRKNIMELSGRTENNRVVNFEGAPDMIGKFVDVEIVDVYANSLRGKVIRTEDEMDLRVYESPESVIARTRKEDEIGVGIYQPS

SEQ ID NO: 5565 - protein, 348 aa, Xenorhabdus sp.
VTQINPQVATQEIFLEPADNQRLMSLCGPLDDNLKQLERRLGIEINRRDNRFKLVGKPLCVSAVASILRRLYVETAPVRGVIPDLEPEQIHLAITETRVLEQAAESVPDYGKAVNIKTKRGVVKPRTPNQAQYIANILSHDITFSIGPAGTGKTYLAVTAAVDALERQEIRRILLTRPAVEAGEKLGFLPGDLSQKVDPYLRPLYDALFEMLGFEKVEKLIERNVIEVAPLAYMRGRTLNDAFIILDESQNTTIEQMKMFLTRIGFNSKAVITGDVTQIDLPRGQKSGLSHAMEVLSDVDELSFNFLYSEDVVRHPVVAKVVIAYEAWEAAEQKRKQALNEKRRQEAQ

SEQ ID NO: 5566 - protein, 155 aa, Xenorhabdus sp.
MSSVILDLQIACEKPEGLPEEVLFRNWLEGVLPQFQAESEVTIRLVDEAESHELNLTYRGKDKPTNVLSFPFEAPPEIELPLLGDLIICRQVVEKEAQEQQKTVEEHWAHMVIHGCLHLLGYDHIEDEEAEEMESLETEILGKMGYPDPYLAEKE

SEQ ID NO: 5567 - protein, 295 aa, Xenorhabdus sp.
MSDDHPSSNDSPGPKKGFFALLNQIFHGEPKNRDDLVELIRDSEQNDLIDPDTREMLEGVMDIADQRVRDIMIPRSQIVTLKRNQPLDECLDVIIESAHSRFPVISEDKDHIEGILMAKDLLPFMRTNAEPFSIDKVLRQAVVVPESKRVDRLLKEFRSQRYHMAIVIDEFGGVSGLVTIEDILELIVGEIEDEYDDDEDNDIRALSRHTYSVRALAQIEDFNDVFGTNFSDEEVDTIGGLVMQAFGHLPSRGESISINGYHFKVAMADSRKIIQVHVKIPDDAEVSGLDKELFR

SEQ ID NO: 5568 - protein, 395 aa, Xenorhabdus sp.
MNNLQQKFDMVIVGAGMIGAATALGLAQEGWRVALLEHQPPQPYSAESEPDIRISAISRASVDLLKQLGAWEHVAQMRSVPYRKLETWEQNDSNVIFDAASLGLPELGYMVENRILQLALWQEFERYPNLTLFCPAELKSMQRHGGHKTWQLELTDGTELNTRLIIGADGARSQVRQLAGIGSRGWQYRQSCMLITIKTEQLQQDITWQQFFPSGPRAFLPLFDQWASLVWYDSPARIRQLQAMSMKQLEREIFQAFPARLGKVTPIAAGSFPLTRHHASDYVREGLVLLGDAAHTINPLAGQGVNLGYRDVDALLNVLIDAKESLEEWDSLTVLMRYQRRRMPDNLIMQAGMDLFHTAFSHDLPGLKTMRNLALMAAQRSGAMKKLALKYALGV

SEQ ID NO: 5569 - protein, 1986 aa, Xenorhabdus sp.
CSKETLAGYEPLALPADNPRPAQVSYQGRDFNFVLDTRLSEQLRTLAKTQETTLYTVLLSAFYVTLAKLSGQDDIVLGTPTDNRHHAQTQPLIGMFVNSLVLRAQLEQTTSVENLIQHIHQLVAEAKAHQDMPFEQLLEILGIERDTSRHPIFQVMFGLHNPEENLPQGTHLPFSPVILEEPLYSPAKFDLHLYLSDSQSGIPGCLNYAVSLFNETTIMRLADIYQRVLVAFVADQKQPLFGLDILSGQERHTLLHRWNQAEMDYPQDKTLSQLFEAQADKTPNNVALVFEDETLTYRQLNERANQLAVVIRERYQQQHHQPMPADTLIALYLARSPEMVISILAVLKAGGAYVPVSPEYPPEQVRFILEDSQTPCVVTQQRYLETLKGCTQAGMEQPALITADDPAVTQNPSTENLALTHQATDLAYVIYTSGTTGQPKGVLQTHENVARLFASTQADYQFNQNDIWVLYHAYTFDFSVWELWGALLYGGRLIIPTIECTKDFDRFSRLCSDQNVTVLNQTPGAFYAFIDAALNIKAEFPRLRYVIFGGDKLNPAQLKPWWDRYGDQAPALINMYGITETTVHVTYKKLTRNDATTVSCIGRPLRDMSAYILDQYGQLAPTGTPGELYIGGAGLARGYLNRPELTAERFVENPFASKRDQERGYTRLYKTGDLARWLPNGELEYLGRNDFQVKIRGYRIELGEIESALASHPQIKQAVVIDREYDGNKTLVAYLVINGELADDALTRYLSSRLPEYMLPASFTSIEEIPLTKNGKVDRRALPEPVFGNKTGYVAPRNALEAQLCTIWQEVLGLEQVGIEDNFFRIGGNSLTAIKLTAAIRRILTTEVSLAQLFELKTIAGLVTQMEKQTYTVIPHLALNRYPLSFAQERMLFIEQFEQGSDTYHIPYLVQLDDETCLPVLETAINRLAERHSVIKMVYQPDDNGQIYQQEMDCNLVIQSQSCETMETLLSTVQAEIATPFDLSDEPSLRLRHYQVADSHYLLLLWHHIAFDGWSADIFINELAEIYPALRDGRDYQLTPLEINYGDYAVWQRHYLQGDNYEQQLAYWQQTLAGYASLNLPTDYPRPAQVNYQGQDFSFELDIALSEQLRTLAKSQETTLYTVLLSAFYVTLAKLSGQDDIVLGTPTDNRHHAQTQPLIGMFVNSLVLRAQLEKNTSVETLIKQTHQQVSEAKAHQDMPFEQLIDALNLERDTSRHPIFQVMFSAQSEAQSSETCLPFCSVTLDKPLYSPAKFDLSLFLSDGKTGITGCLNYALSLFNENTITRLAASYQRVLSAFVADQRQALSRIDILSAQERHTLLHGWNQTAAPYPQDKTLPQLFEAQAGQHPEAIAVIFEDQSISYSELNRRANQLAHHLIALGVRPDDRVAICLERSPEMIVGLLAILKAGGAYVPLDPTYPTERLSFMLADSAPVALLTQTTQADKLSGSVTTVLLDEQTQFLTTLPDTDPDTQALGLTSRHLAYVTYTSGSTGQPKGVMVEHRNVLRLIINNGFADIGPDDCIAHCANISFDAATWEVWSGLMNGARILLVPEKTLLQPVEFGQCLSTAGVSALFLTTALFNQYADLIAPALSGLRYVLFGGEQSDNRAAMRLRAEHSPQHLLHVYGPTETTTFATAYDMPQVEGGKLPIGKPINNTRIYILDNQGQPVPAGVPGEIHIGGDGVARGYLNRPELTAERFLIDPFSPEPNARMYKTGDLARWLPDGNIEYLSRNDFQVKLRGFRIELGEIENALTAHPQVKQAVVIDREHNNHKVLVAYLVTEGTLSSDSLMEYLSSRLPEYMLPASFSVIESIPLTLNGKVDRRALPEPIWSNQEHYIAPRNALETQLCHIWQDVLGLEQISVEDNFFRIGGDSIVSIQLVSKLRQAGFTLQVKAIFEAPTVAQLARLLTQTVSSEKVIAEQGLLTGEFDLLPVQQTFFDWDFANAHHWNQAFMVQIPGHIKSAQVEQALIMLTERHDMLRTRFIKTE

SEQ ID NO: 5570 - protein, 194 aa, Xenorhabdus sp.
QPILRYVLRFIPQIFRQVALTACSSQISQIRSKKPETQSVNGQNSQKHFFLQTSQDEFETLVKNLDIKFKILNQYADWKGVAYRLGGNTKRGIDCSAFVQRTFHDQFGMALPRSTSGQQSIGQTVSRTKLKAGDLVLFKTGVHRRHIGIYIGNNQFVHASTSSGVMVSKLTDTYWSKRYYGARRVLADDLKASI

SEQ ID NO: 5571 - protein, 682 aa, Xenorhabdus sp.
MKGSEWQMLAGPVLILMILSMMVLPLPPFLLDLLFTFNIALSIMVLLVAMFTRRTLDFAAFPTILLFSTLLRLSLNVASTRIILMEGHTGSAAAGQVVEAFGHFLVGGNFAIGIVVFVILILINFMVITKGAGRIAEVGARFVLDGMPGKQMAIDADLNAGLIGEDEAKKRRAEVTQEADFYGSMDGASKFVRGDAIAGLMILVINIIGGLIVGVAQHNMSLGDAAEAYTLLTIGDGLVAQLPALIISTAAGVIVTRVATDEDVGQQMVTQLFNNPKVLMLSAGVLGLLGLVPGMPNFVFLLFTAALAGVGYFLLRKDKDPLTAQHAEMKAVEEQQQTAEASWSDVQLEDPLGMEVGYRLIPMVDFRQNGELLGRISGIRKKFAQEVGYLPPVVHIRDNLELAPASYRIMMKGVEIGRGEAHPGRWLAINPGGAVGDLQGDLTKDPAFGLPAVWIDDSLREQAQVQGYTVVAASTVVATHLNHLLSQHSSELFGRHEAQQLFERVSQEMPKLTENFIPDVVSLTTLHKVLQNLLAEQVPIRDMRTVIETLAEHAPVQTDPYELTAAIRIALGRAIAQQWFPGVDEIKVIGLDANLERILLQALQGGGGLEPGLAESLERQAAEALERQEMLGAPPVLLVNHALRPLLSRFLRRILPRLVVLSNLEITDNRQIRMTATIGGAR

SEQ ID NO: 5572 - protein, 383 aa, Xenorhabdus sp.
VAEDSDLEKTEEPTPHKREKARKEGQIARSKELTSILMLAGGVSLLWMSGQSLTHELSLMVFEGFNFDHNMVSNDKQMVQQVGRLLKQAVWAVLPVFTGLVLIALSAPTLMGGLIFSSKSIKFDLTKLNPIAGLKKIFSMNALAELFKAILKASLVGGGAALFIWANWPAMLNLTTQPPLVALSDAMMMLIFAGYIVLFMLIPMVAFDVLYQIRSHLKKLRMTRQEIKDEFKEQEGDPHVKARIRQQQRAAARKRMMADVPKADVIVTNPTHYAVALQYDSNKMGAPKVLAKGAGLIALRIKEIGAENRIPLLEAPPLARALFRHAEVGGFIPAALYAAVAEVLAWVYQLKRWKREGGLKPKTPENLPVPPALDFAGENNRHG

SEQ ID NO: 5573 - protein, 171 aa, Xenorhabdus sp.
MENPLQLNRDSEYRSSVIYNVEYTKGVNQLSYAEEGFINHPIMQHILSTNIAILGERLVKGYRYSIDIHQFRVKASSGKESPTTSGIHQDGQEWIFMHFIQGNNIAPVISEVHVSSDEAPPLLQTAMTNFLETLAIDDKQLYHRASNVRQISPTSEAFRDLLLVTFRQFPE

SEQ ID NO: 5574 - protein, 229 aa, Xenorhabdus sp.
MLLEEYIEGIEGTIECVMTQNETYPILINEKLILTEKNNTILENLLISPPVSFTEAEQQQIRDYAIACIHAVGLNYAIAHLEFRMTSDGPIVIEINPRLGGLFVSTAFRDVAGLNPYQLYLSILLHEQDIDAQIKQGQQKAMTGKQHYSMLAIYPENSGYFHGIENIEYIKNNACVIECRTQPAGCYIDAETEEHYLIRCWAKVDNAFHAYALHDEIIQHVKPIITPIL

SEQ ID NO: 5575 - protein, 371 aa, Xenorhabdus sp.
ENWIDWRWQQKNAIRDEEALRLACGGWSEEITQRIQHNLQGQKMQITPYYLRRILATSQSDDITASPLWRQVVPFWSEEKLNGYDGESENWELNHEMKTPICQHKYDNRVILRMVNACNSYCQFCFEALRTLKVDSEKSNAGRSSFQQSIEYIKNTPSIEEVILSGGDPLMLTDNKLAESLAAIREIRDDLLIRVHSRALTFNPYRITDNLLDALEKYRVNAFGVHICHPLEISEEFQSAVRRIQQVVPIVFSNMPFLRGINDSEETLHKLFIALYRIGVKPYYLYHFMPFSPGSSEYKASINDGIAIMKRLKRRVSNIALPEYVLPHMKGKFTVPLFTDPDEIPYFETRGSQHYYRFINWKNEPCEWLDN

SEQ ID NO: 5576 - protein, 37 aa, Xenorhabdus sp.
VTCSANAIGIKAFAVAACEYNKAEQKKKITASSQGRE

SEQ ID NO: 5577 - protein, 113 aa, Xenorhabdus sp.
VRWFPLILICLLIYIESVLFVRIASEVGVLLTLLLVVLTSCVGVSLVRNQGIKNFMSMQQKMAAGESPAEEAIKSVSLVIAGFLLIIPGFFTDFLGLLLLLSPVQKLLTAKSL

SEQ ID NO: 5578 - protein, 181 aa, Xenorhabdus sp.
TVQREYVLNHVLNLLEQQGLSVTLETLLAPLNIDIDQIKHFWPDREALLYDCLRFHSQQIEAWQRHTLLDETLSPEQKLLARYDILKEKVEENRCPGCLFIAACSAFPDTDHPIHQLAALQKQSSFQYSNELLQQIGIENSEQVAKQMELILEGCLSKLLVKKDIEDVVTAKLLAQDIHDL

SEQ ID NO: 5579 - protein, 602 aa, Xenorhabdus sp.
MMKRILILFLLFGAISAFPLKSSALFEQAGQLGQNRYLPAEQAFMFDFQQKGEQLTLSWDIKPGYYLYRKQFVITPDQQTSLGHIDFSKATAHEDEFFGKTEVYFQSAHINIPILSATNDSTLQVTYQGCAEAGYCYPPETISVPLYAVTAPIKPSVDATPKQSESKPAAIKTPQSDSLPQEKTLLKTEQMPFSPLWALLIGIGIAFTPCILPMYPLISAIILGQKRPESLKRIFWLAMSYVQGMAITYTALGLIVAAAGLQFQAALQSPYILIGLSVLFILLALSMFGMYSLQLPSSVQTRLVNWSNQQKSGSYFGVFVMGMLAGLIASPCTTAPLSAILLYIAQSGNAVLGGLTLYLYALGMGLPLIAVTLFGHKFLPRSGPWMQYVKEAFGFIILALPIFLLERVLGDVWGIRLWSILAVAFCGWAFSLTLNHKNGWLRTLQLILLALALIASRPLQDWVWGNSVIEQQQAPLEFQQINDWQELSHILAENRHKPIMLDLYAEWCVACKEFEKYTFRDPQVQKQLSHFLILQANVTKNGPDQKELLKKLAVLGLPTILFFDTRGKEIPDSRVNGFMDAEHFNRHLQHLYPIASEQIKDQ

SEQ ID NO: 5580 - protein, 433 aa, Xenorhabdus sp.
MLAVELVIVLLAIFLGARLGGIGIGFAGGIGVLILAILGVKPGSIPFDVISIIMAVIAAISAMQVAGGLDYLVQQTEKLLRKNPKYITILAPIVTYFLTLFAGTGNISLATLPVIAEVAKEQGIKPCRPLSTAVVSAQIGITASPISAAVVYMASVMEGQGISYIHLLMILLPSTFCAIVLMSFIISWLFDSKLANDPIYQKRLADGLIEMRGASQIEIKPKAKLSVLLFLLGVIGVVIYAVINSPSVGLVEKPLMNTTNAILIIMLSVATLTTIICSVNTDAILNSSTFKAGMSACICILGVAWLGDTFVQANLDWIKETAGNLIHSRPWLLAVIFFFCSALLYSQAATAKALMPMALALHVTPLTAIASFSAVSGLFILPTYPTLVAAVQMDDTGTTRIGRFVFNHPFFIPGTIAVGLAVTFGFLFGGMIL

SEQ ID NO: 5581 - protein, 478 aa, Xenorhabdus sp.
KKVLMSNNIRIEEDLLGKREVPAEAYYGIHTLRAIENFYISDRSINDVPEFIRGMVMVKKAVALANKELHTIPGKVADIIVKACDELLNTGKCMDQFPVDVFQGGAGTSLNMNTNEVLANIGLELMGHQKGEYEYLNPNDHLNRSQSTNDAYPTGFRIAVYNAIMQLVNSIELLKAGFDKKGIEFDDILKMGRTQLQDAVPMTLGQEFRAFSMLLKEEIKNITRTAELLLEVNLGATAIGTGLNTAPGYQKLAVEKLAEVTGLPCIPAEDLIEATSDCGAYVMVHSALKRLAVKMSKICNDLRLLSSGPRAGLNEINLPELQAGSSIMPAKVNPVVPEVVNQVCFKVIGNDTCITMAAEAGQLQLNVMEPAIGQAMFESITILSNACRNLVEKCVNGITANKEVCESFVFNSIGIVTYLNPFIGHHNGDIVGKICAETGKSVREVVLERGLLTEAELDDIFSVENLKNPTYKAKRFDD

SEQ ID NO: 5582 - protein, 52 aa, Xenorhabdus sp.
VILLQGTELQQFIIDKLEDSKAQDIVSIDVRGKSSITDCMVICTRYIQVVIF

SEQ ID NO: 5583 - protein, 210 aa, Xenorhabdus sp.
IHALFGGTFDPIHYGHLRPVEALAKLAGLKQVILLPNHVPPHRPQPEATAQQRLEMVRLAVQDNPLFTVDTRELQRQTPSYTIDTLKSFREEVGEQCPLAFIIGQDSLQSIHTWHRWSELLDICHLLVCSRPGYSKQLSTPEMQEWLEQHKIDTPAPLSHKSHGYIYLAETPLLDISATDIRRRHQQGLNCDDLLPPLIQNYIDSQQLYS

SEQ ID NO: 5584 - protein, 263 aa, Xenorhabdus sp.
MAERLAKLSELLHDDVLLILRGHKLTKAQENSTWFKAIGKNGVYISCLNPEQNRLPQWVAQRAKSMGLSLEDEANQLLCYCYEGNLLALSQALERLSLLYPDNRLTLHRVEEAVNDAAHFAPYHWVDALLAGKVKRGWHILKQLRQEDTEEIILLRTIQRELMLLLTLKRQEKTTPLKTLFDQHKVWQNRRMLLTTALQRLSLQDLHSAIHLLTQMELRIKQDYGQSIWADLETLSMLLLYGKDLGKTHGKILPESFLNASHH

SEQ ID NO: 5585 - protein, 162 aa, Xenorhabdus sp.
VLVTAGCGFHLRGTTQVPKELQTLQLNSGDPYGPLARAVRQQLRLNDVRIAEQASASLPILKLLGSSENNVTVSVFQDGKAAERQLVLDVDAQVLMPNGNIYPLEVRVERSFFDNPLEALAKDAENELVKQEMREQAARQLIRKLLTIQSSEQPKSAETQKQ

SEQ ID NO: 5586 - protein, 864 aa, Xenorhabdus sp.
MQEQYRPEDIEQQVQLHWQEKQTFKVTEDSSKEKYYCLSMLPYPSGRLHMGHVRNYTIGDVISRYQRMLGKNVLQPIGWDAFGLPAEGAAVKNKTAPAPWTYSNIEYMKGQLKMLGFGYDWDREVTTCTPEYYRWEQWFFTKLYEKGLVYKKTSAVNWCPNDLTVLANEQVIDGCCWRCDSPVERKEIPQWFIKITDYAEELLNDLDKLEEWPEQVKVMQRNWIGRSEGAEIIFNVADSQEKLTVYTTRPDTFMGATYVAVAAGHPLAKQAAENNSELAEFINECRNTKVAEADMATMEKKGMPTGMFVIHPLTNEKMPIWVANFVLMEYGTGAVMAVPGHDQRDWEFATKYNLPIKAVILDNDGNVPTVQESAMTDKNALVNSGEFSGLSHEDGFNAIADKLVEMGVGKRKVNYRLRDWGVSRQRYWGAPIPMATLEDGTVVPVPEDQLPVILPEDVVMDGITSPIKADPEWAKTTINGQPALRETDTFDTFMESSWYYARYTCPDYDKGMLDPAAANYWLPVDQYIGGIEHAIMHLMYFRFFHKLMRDAGLVNSDEPAKHLLCQGMVLAEAFYYTGSNGEKIWVSPADAIVERDEKGRITKAMDSDGHELVYTGMSKMSKSKNNGIDPQLMVNKYGADTVRLFMMFAAPPELTLEWQESGVEGANRFLKRVWRLVHEHVSKNADKGEIQPLDITSLTTEQKDLRRDLHKTIAKVTDDIGRRQAFNTAIAAIMELMNKLTRAPLETEQDRALMQEALTAVVRMLSPITPHACFVMWKALGNECDIDTAAWPQADEKAMVDDTKLVVIQINGKVRGRITVPADATKEYVQEMASQEYSVTKYLEGVSIRKVIYVPGKLLNLVVG

SEQ ID NO: 5587 - protein, 241 aa, Xenorhabdus sp.
MISLKNVSKWYGQFQVLNDCSTEVKKGEVVVVCGPSGSGKSTLIKTVNGLEAVQQGEISVNGTKVNDKKTDLAQLRSQVGMVFQHFELFPHLSIIDNLTLAQVKVLKRDKQAATEKALKLLDRVGLSNHAHKFPSQLSGGQQQRVAIARALCMDPIAMLFDEPTSALDPEMINEVLDVMVELANEGMTMMVVTHEMGFAKKVAHRVIFMDEGTIVEDSRKEDFFVNPKSERARDFLAKILH

SEQ ID NO: 5588 - protein, 224 aa, Xenorhabdus sp.
MYQFDWSSIVPSLPLLLDGLIITAEITLIAIVIGIAWGTILAMMRLSSIKALSWFAALYVNLFRSVPLVMVLLWFYLIVPSLVQNVLGISPKTDIRLISAMVAFSIFEAAYYAEIIRAGIQSISRGQSAASLALGMTHMQSMRLVILPQAFRAMIPLLLTQGIVLFQDTSLVYVLSLADFFRTASNIGERDGTQVEMVLFAGLVYFIISFSASMLVNYLKKRTI

SEQ ID NO: 5589 - protein, 112 aa, Xenorhabdus sp.
ALKPRGQKAAGLAMGLTLPQTYRYVLLPNAYRVITPPMTSEMLNLVKNSAIASTIGLVDMAAQAGKLLDYSAHAYETFTVITLAYVGINLVIMLAMSMLEKKIQLPGNIGGK

SEQ ID NO: 5590 - protein, 254 aa, Xenorhabdus sp.
MKSFLKTTLLATTLAMTFGVPYVMANEAKASDEVKLNKAFKTAEQQNSYALGASIGRYMEKSLEEQKALGIDLDKSQVMSGFGDAINNKSKLNDSEIQQILSEFDAKIRASLQVKMEKEASENSEKGNKFREQFAKEAGVVKTKSGLLYKVEREGTGKTPTLTDTVIVNYKGSLIDGNVFDSSYDRKEPLSIPLNSVITGWKEGLQHLKKGGKMKLVIPPELAYGKNGVQGIPVNSTLVFEIELLDIKPSAKTK

SEQ ID NO: 5591 - protein, 240 aa, Xenorhabdus sp.
ISGDKISGDTSDIDLLENQPFSETDHEILKSYEAAVDGLAMLIGGHCEIVLHSLEDLKCSAVRIANGEHTGRQIGSPITDLALRMLHDITDEDSSVSRAYFTRAKSGALMKSVTIAIRNRQRRVIGLLCINMNLDVPFSEIIQTFIPEKTHDVSSNVNFASSVDDLVAQTLEFTIEEVNADRNVSNNAKNRQVVLNLYEKGIFDIKDAINQVADRLNISKHTVYLYIRQFKNGECAHPEK

SEQ ID NO: 5592 - protein, 128 aa, Xenorhabdus sp.
LSYCLLVTGPAYGTQQASSAYQFAQALIASGHKLHSVFFYREGVQNGNQLTAPANDEIDLVRAWQSLAIQHQSELFICVAAALRRGVVDEQQANELDLSSANLADGFELNGLGSLAEAMMLCDRVVQF

SEQ ID NO: 5593 - protein, 119 aa, Xenorhabdus sp.
MKKIAFIFTEAPHGSSAGREGLDALLATSALTEQVGVFFISDGVLQLLSNQQPDKILSRDYISTFKILPLYDIEKCYICLEDLTVRGFTPEDDFILDAEFLSAAAIRQMLAGYDVVLKF

SEQ ID NO: 5594 - protein, 67 aa, Xenorhabdus sp.
MLQNGVLLGVNGNPYLAELIHTGAGIYALQEDLDARGLTERVSEHVKMVNYNGFVSLTVKHQQSLSW

SEQ ID NO: 5595 - protein, 124 aa, Xenorhabdus sp.
MATINQLVRKSRSSKVVKSNVPALEACPQKRGVCTRVYTTTPKKPNSALRKVCRVRLTNGFEVTSYIGGEGHNLQEHSVILIRGGRVKDLPGVRYHTVRGALDCSGVKDRKQGRSKYGVKKPKA

SEQ ID NO: 5596 - protein, 166 aa, Xenorhabdus sp.
MARQTPIARYRNIGISAHIDAGKTTTTERILFYTGVNHKIGETHEGSATMDWMEQEQERGITITSAATTAFWSGMAKQYEPHRINIIDTPGHVDFTIEVERSMRVLDGAVMVYCAVGGVQPQSETVWRQANKYNVPRIAFVNKMDRMGANFLRVVEQIKTRLAATP

SEQ ID NO: 5597 - protein, 72 aa, Xenorhabdus sp.
MELSSFEQRFEQLETKLTYQEMTIEELNQEVRKQQVEIDRLKEQLKLMAERLKTHQSSIIAPMSEETPPPHY

SEQ ID NO: 5598 - protein, 127 aa, Xenorhabdus sp.
VNTDDLTSVEHKLVKGNIDIEVSSCNDYEDSRKESKNVIELKNKIPTIFKNDEYVECYRKKFDSYAHFTIPVAVGISPENGLSHDADVFILSHQKTYAGALIPKDVLDRIKKAQKDMMGKLDIRMTI

SEQ ID NO: 5599 - protein, 284 aa, Xenorhabdus sp.
MFLISNSKMLKKAQREGYAVPAFNVHNLETVQVVVETAAKMESPVILAGTPGTFTYAGLEYMVSICKEAAMINKLPLALHLDHHEDINDIRHKVETGIRSVMIDGSHFPFEKNISTVAEVVRLCQRFDTSVEAELGRLGGQEDDLTVDSKDSFYTDPLAAKEFVERTGIDSLAVAIGSAHGLYHGEPHLDFSRLAEIHRHVEVPLVLHGASGIPEEMIHKSIALGICKVNVATDLKIAFADAVKAYFAQYPDANDPRKYITPGKIAMQKVVEKKITICGSAGRV

SEQ ID NO: 5600 - protein, 146 aa, Xenorhabdus sp.
MLGIVITGHGMFASGLLQAVVQIIGKQSSCIAIDFPDGMTTEQLSQELYTARETCDSGKGGIFLTDLLGGSPFRQAAQLALIHPQWQVITGTNMQLAVEMMMVRDEMNAVEFRDMALECGHRGLTSLWHQQQQVKQQVLPDDSDGI

SEQ ID NO: 5601 - protein, 298 aa, Xenorhabdus sp.
MVFNKLDKAVSEKSRKHGKDIAQDSNSADRDDYIDMTPAEDLTKREINVMALRSLLLQASFNYERMQAGGWLYTLIPSLRKIHKNPDDLTSSMKMHMEFLNVHPFDVTFLSGLVLAMERSKEKISTIRAVKVALMGPLGGIGDALFWLTLLPICAGIGASLALQGSILGPILFLLMFNVVHFALRFGLAHYGYHTGTKAITMLKVHTKNISHAASIVGMTVIGALVASYVHLSTPFVMKAGEAKIALQTDVLDKLMPNLLPLTFTLLVYWLMKRGFSPVKLIGITAVFGVVGKLVGFL

SEQ ID NO: 5602 - protein, 238 aa, Xenorhabdus sp.
MHRPVVIGPLVGLILGDIQTGLLVGGALELVWMGMVPLAGAQPPNVVIGGIIGTTFAILTQADPKVAVGIAVPFAIAVQGCITLLFTIYSPMMHKCDQMAKKRNWRGIEWVNYFGLIILFCFYFIVAFLPIYFGADTARAVVQQAPKWLLDGLSVAGGMMPAIGFALLMKVMMKKTYVAYFILGFISVTFLQLPIIAIALGALAIALIDFFNRTRDDNGNPQGTASQSNSAEEMQDGI

SEQ ID NO: 5603 - protein, 160 aa, Xenorhabdus sp.
MSTPNILLTRIDNRLIHGQVGVTWANSLGANLVVVANDEAANDLVQQSLMDMVMSDGVQTRYFTLQKTIDVIHNAAERQKIFIVCKTPQDVLTLVKGNVPIHFVNIGNMHFSEGKKQIHKIVAVDKGDIETFIELQKRGIPCEIRRVPDESGEDIANLLN

SEQ ID NO: 5604 - protein, 379 aa, Xenorhabdus sp.
TAEEIQHQPRLWRTLYHELQHSQPFWQPFLRQLLIKPDLQIILCGAGSSAFVGKAIAPYLREIWWSGAKFDDGKKHRPDIQAVASTDIVPAPLQYLDTTKPTLLVSYARSGNSPESIAVIQLADSLLADCHHLILTCNPEGELARYAENKKHVCSLIMPEGANDRSFAMTSSFSCMAMATLLLLGERTFDMTKQKDALERVAALCETQAPGWQPLIQRIIGLGFKRMIALGTAGFAGIAEEGALKMLELTAGRIATRYDSCMGVRHGPKFMIDHDTLVVVMLSADPHRRHYDIDLLNELRRDGLAKQIIVLTSQPHPESLEIPADLPDSWLIFPYLLFFQLLGFETSLELGLSPDNPCPTGEVNRVVKGVQIYPYTRSE

SEQ ID NO: 5605 - protein, 368 aa, Xenorhabdus sp.
PADFRNRVCEIADLIGFPREKIWLGGDHLGPNAWQDQPAEEAMTLAETLIYDYVAAGFRKIHLDCSMSCADDPVPLTDDIVAQRAARLCLAAEQSWQNNGGEKPVYVIGTEVPVPGGTTEDVVDEMQVTTPVSAASTLKIHRAEWVKAHLAHVWPRVIALVVQPGVEFGNHQIEHYQPEKAYSLSQYIATQPNIVYEAHSTDYQTPQTYRNLVRDHFAILKVGPALTFALREGLFALDKLDREWNGESEAVHLRETLEQVMCNQPEYWRSYYKGNAHEQYLDRQYSLSDRIRYYWANSAVESAVEKLLSNLRRRPLPLSMISQYLPEQAKAINAGSLAYDDPKVWVMDKIRQVLKDYAEACEAGGTAL

SEQ ID NO: 5606 - protein, 71 aa, Xenorhabdus sp.
NLARLSKDEMDKVNTDLAASGVAFKERYNMPVIPDNVEQTQPQHLREYFQQRLRHYRQQSRSLSRLPYEPK

SEQ ID NO: 5607 - protein, 128 aa, Xenorhabdus sp.
MTIFSIRSFWTKLSALVVLFVGISCQQALAHAHLKDQTPAENTTVEAAPQAITLSFSERIELGFSKVKLTGPKKEEIKTGRLELDPETKTKLILPVEAKLSAGEYRVDWSVLSVDGHKTKGVYNFTVR

SEQ ID NO: 5608 - protein, 170 aa, Xenorhabdus sp.
MLKQEMITKLNEQLNLEFYSANLYLQMSAWCSDKGYEGAAAFLRAHSQEEMQHMQRLFDYLGDTGAMPVLGAIQAPPVEFSSISDVFNQTYEHEKLITEEINKLAHLAMTTQDYSTFNFLQWYVSEQHEEEKLFKSILDKLGMVGESGKSLFLLDKDLKGLSVPAHAAHA

SEQ ID NO: 5609 - protein, 317 aa, Xenorhabdus sp.
MTELRKLYPAYDAYKTGYLDTGDGHQIYWELCGNPKGKPAVFIHGGPGGEIAHYHRQLFNPEHYHVMLFDQRGCGRSKPHASLENNTTWHLVDDIERLRTLMGVDNWLVFGGSWGSTLSLAYAQKHPHAVSELVLRGIFLLRPQELQWYYQEGASRFFPEKWERILSILSEEERTDVISAYQKRLTSSDPAVQLEAAQLWSTWEGETITLLPSEHADSFAEEQFALAIARIENHYFIHNGFMDETQQLLDHIDAIRHIPAVIIHGRYDMACQVQNAWDLAKAWPEAELHIIEGAGHSFDEPGILHQLIKATDKFVGK

SEQ ID NO: 5610 - protein, 125 aa, Xenorhabdus sp.
MKIKQFIHRAGLLNVAVALSFAFTTAVSAAENDHVAKFVSCKNLTKDQIAAQVKQDFLQNRLNHWDKDRKQLGTAKPVAWVNVNDITGDKDALQVPLAVRGTKNDKSYNVTIDCQKETISYSEIR

SEQ ID NO: 5611 - protein, 251 aa, Xenorhabdus sp.
RPMLSDPVWDKLFVFMQQNRLTYHKKTHRLIMEGILFRMRTGIPWRELPAEYGKWNTVFKRFNVWSKKGVFNSLFNELAKNSDTEWLFIDGSIVRAHQHSSGAASKENEAIGKSRGGGSIKIHLAVDSYGLPVHFELSEGQTPDMVHAESLVAQSPPADFVVADKGYDSQALRTYIEEQGATAVIPYRKNSRNSDKKWDKDLYRYRHLVENAFARIKHFRAIATRYDKLARNYASTLALAFIIIWLPMWVE

SEQ ID NO: 5612 - protein, 409 aa, Xenorhabdus sp.
MTNLAVKKKISILSCVIAAIFGNVSLSYAAVVPEGTKLAAKQEIVRNSLSEPASLDVHKVSSDVEFDIIHDFFEGLVYIDRRGNIEPRLAESWETSDNKTWVFHLRKGIKWSDGTPITAHDFVFSWRRLVEPDIVSPYGSYLENISIINANDVLTGKRKGEELGVKALDDMTLEVRLDKPMGDFLQALTHTVMVPVNKNAIEKHGDKWTRPGNFVGNGPFKLSEWKVNEKIVGVRNPHYWDDKNTVIDKVHYLVIASEKSALSRYLAGEVDFTGTIPLESYESVKEKMGEQVYTSSKVGTYFYEFNNKKPPFDNIKVRQALNLAVDRDVIAYKVLRQGQKPAYTLVPPNTGGFEFSGPDYASWTQEQRIEKAKALLNEAGFNKDNPLKFNLLYNTHESHQKIAIAVRAC

SEQ ID NO: 5613 - protein, 277 aa, Xenorhabdus sp.
MSEFVKPEHECPFDPKQYHCDCFIAPVGSFSWALIQLKLRKRVTRSVWVNCQGNNEMYLAITPRVNNLVVEKESAYAVDGVAIGTKYDYLTHIELRNEHGNFVPWQPTQEDMMACDWNFVEQKEERIKPKPFVKPAHQLKVRLTVGEYISSNKTHYVGYGDLHGTTTDYSTGAWEVISNDTLLPNKIRQFRVIHSNSEPNRDFVLDEMSNSSKIKDQLGSKKLIIKYLDKEYDLGIAKTYYSATLLYPRTEGSAALEELFISSIGKILELEFNFFEE

SEQ ID NO: 5614 - protein, 154 aa, Xenorhabdus sp.
KKHGRRYLGYKLTLNVDPNFIVIRPIATGTGVVHDSQFFEAVLDRSNPRRDIYADKGYASQNRERVLKEQGYRVHIQRKAARNKPLSHCQKGRNKKIAKTRARVEHIFGSLSQMGEKIIRTIGQLRANFAMTMKATCYDLQRLVYFGKSGIHAF

SEQ ID NO: 5615 - protein, 111 aa, Xenorhabdus sp.
LWGATLSTGFLTAILSSVMNNLPTVLVGALSVESSTATGVIKEAMIYANIIGSDLGPKITPIGSLATLLWLHVLAQKNIIISWGYYFRVGIVMTVPVLFVTLSALALRLSF

SEQ ID NO: 5616 - protein, 144 aa, Xenorhabdus sp.
MLVYYVMSHEIGHALGLHHPNEHMRDLGWSHQDPIDLEAGHVYGESITALVPRGAPDARTPLMGADDGYFERLHDQLHRRLNYDDIGPSELELNAIATENACGGLHSSQSKLNVALSESCKEKPRVFYPIAQALVPIYQTQLFN

SEQ ID NO: 5617 - protein, 205 aa, Xenorhabdus sp.
TTSEIISRIGQLTRMLRDSLRELGLDQTIAQAAEAIPDARERLNYVVQMTAQAAERVLNCVEVAQPRQNELEASAKSLTQRWDEWFANPTDLELAGARSLVTDTRNYLSLVPEHAAFTNAQLLEIMMAQDFQDLTGQVIKRMMEVIQELEKQLVMVLMENIPSDQMAKTKKENDSLLNGPQVNQDGVGVIANQEQVDDLLDSLGF

SEQ ID NO: 5618 - protein, 129 aa, Xenorhabdus sp.
MASKDLRFLVVDDFSTMRRIVRNLLKELGFNNVDEAQDGAEALTKLRTAEFDFVISDWNMPNIDGLELLKTIRSDSELAALPVLMVTAEAKKENIIAAAQAGASGYVVKPFTAAILEEKLNKIFEKLGL

SEQ ID NO: 5619 - protein, 342 aa, Xenorhabdus sp.
VDDSALMRQIMREIINSHPDMEVVDCAPDPFVARDLIKKHNPQVLTLDVEMPRMDGIDFLEKLMRLRPMPVVMVSSLTGKGSEITLKALELGAVDFVTKPQLGIREGMLAYSELIAEKIRAAAQAKVSTMKPVDKVDAPLSFKPLLSSEKLIAVGASTGGTEAIKNLLQPLPVTSPALLITQHMPSGFTRSFAERLNKLSQITVKEAEDGERVLPGHAYIAPGDRHMELCRSGANYQIMTSSAPPVNRHRPSVDVLFRSVAKYAGRNAVGVILTGMGSDGAAGLLEMKKAGAYTLAQSEASCVVFGMPRAAIQLGAVDDVMDLQKLSRTMLAKISTVQSVRI

SEQ ID NO: 5620 - protein, 295 aa, Xenorhabdus sp.
MKSNLTASNTEATVPLNFMFQRHTLSDAHFERICQFIYQRAGIVLAKNKREMVYNRLVRRLRVLGFNDFGQYLSILEQNSHSKEWELFVNALTTNLTAFFREAHHFPILAAHAGKKNGGTYRVWSAAASTGEEPYSIAMTLCDALGHRSNRIKIIASDIDTQVLEKARQGIYRLDELQHLSDSQKKKYFFKGVGFYEGYARVRPVLTEMVSFQHLNLLDSEWALEGKFDAIFCRNVMIYFDKKTQERILRHFVNFLKPDGLLFAGHSENVTQISREFYLQGQTVYGVGQARRGHE

SEQ ID NO: 5621 - protein, 141 aa, Xenorhabdus sp.
EVRDLAQRSAEAAKEIKILIDESVHRVNQGSELVNHAGQTMDELVRSVNQVTDLMTEIAAASDEQSRGIHQVAQAVSQMDQVTQQNAALVEQSAAAASALEDKADTLVRTVAQFELPKMSEYEHNHQGYTASKMTDEYAVN

SEQ ID NO: 5622 - protein, 103 aa, Xenorhabdus sp.
MSIQAIEGVLQQMQAQALQAASIAKPMPVKGGFASQLTAAVEKINLSRVEATKQAQDFTLGTPGVELNDVMVNMQKATISLQMGIQVRNKLVSAYHEVMNMQV

SEQ ID NO: 5623 - protein, 444 aa, Xenorhabdus sp.
MNLTLLPTDLTLEKSVGKNQQALNSSPGSNAPKEQVTEFGQILSAEQKNSVQTAKNRTDGSNSESGEKYSTDNRDEEKLSSSLTVTGQVARLDKSSVSGFLASGNDTEFTLSEEDDLLSAEMLINAMPIQLAGLINHRPAGEGSESSDDLLRTENSLEDTLSDRKLSGKKTKADIALIATNPAEENDLDSDIRSFTTQQTASATNRAALVPATGKVKATANGTEQNAESSVSGKGDIGKAFLSTQGATALASASVETSSSNTLHNLFSAPLLATGHQANGQIQLNNAPAPLLSAHLGSEEWQQQLNQQVLFFNRNGLQQAELRLHPQELGALHIRMNVEDNQAQLHFVSAHQHVRAALEAALPNLRLSLAENGIQLAESSVGSDTSGNWQQEQAADPQQHDNTGSHTGNHRALAATQAPATHESAIRLTPQQLASSRGGVDIIA

SEQ ID NO: 5624 - protein, 148 aa, Xenorhabdus sp.
MQQHSPLVTLRELAQDAAEKAATQLAQIRQSHQQMEQQLTALMSYQDEYRTRLNDTLSSGMSSSTWQNYQQFMKTLEMAIEQHRLQLNQWKKRLEQAMSQWQEKQQRLNAFDTLQQRAEHSLKLHQNRMEQKQMDEYAQRGAQRRMKQ

SEQ ID NO: 5625 - protein, 455 aa, Xenorhabdus sp.
VMTARLGRWLATLDGMEKRLEKTPKVRRYGRLTRATGLVLEATGLHLPLGATCLIERQNGNTLEEVESEVVGFNGEKLLLMPLEELEGIVPGARVYARAYGEEAGSGRRLPLGPELLGRVLDGAGRPLDGLPAPDTGYRAPLTTPPINPLQRTPISDVLDVGVRAINALLTVGRGQRMGLFAGSGVGKSVLLGMMARYTQADVIVVGLIGERGREVKDFIENILGEEGRARSVVVAAPADVSPLLRMQGASYATRIAEDFRDRGKHVLLIMDSLTRYSMAQREIALAIGEPPATKGYPPSVFAKLPALVERAGNGVSDGGSITAFYTVLTEGDDQQDPIADSARAILDGHIVLSRALAESGHYPAIDIEASISRAMTSLIDNTHYRRVQHFKQLLSSYQRNRDLINVGAYAAGSDPLLDRAIELYPHMAQFLHQNIEERSEYDAACAQLQQLLPS

SEQ ID NO: 5626 - protein, 92 aa, Xenorhabdus sp.
VCDGTALLNQIREFIQQEPMFSGKPQLRVHPQNIPLVEQQLGEILALHGWRLVADNKLHPGGCKVSADEGDLDASLATRWHEMCRLAVSGEL

SEQ ID NO: 5627 - protein, 330 aa, Xenorhabdus sp.
MSLTGTEKSAIMLMTLGEDQAAEVFKHLNSREVQQLSIAMAGMKQVSNQQLAEVMAQFEEDAEQYAALSINANDYLRSVLVKALGEERASSLLEDILESRDTTTGIETLNFMEPQAAADMIRDEHPQIIATILVHLNRGQAADILAMFDDRLRNDVMLRIATFGGVQPAALAELTEVLNNLLDGQNLKRSKMGGIRTAAEIINLMKSQQEESVIDAVRTYDGELAQKIIDEMFLFENLIGVDDRSIQRLLQEVTTDSLLVALKGCDQALRDHFLNNMSQRAAEIMRDDLATRGPVRMSQVEAEQKAILLVVRRLAENGEMILNGGDDTYV

SEQ ID NO: 5628 - protein, 563 aa, Xenorhabdus sp.
MSAATTDAENPQKGFSAIINRIKADPKVPLLVAGSAAIAIIVALFLWLRSPDYRVLYSNLSDKDGGEIVTQLTQMNVPYRFAENGAAIMIPTDKVHEIRLKLAQQGLPKGGAAGFELLDKEKFGISQFSEQVNYQRALEGELARTIESLGPVQSARVHLALPKPSLFVREQKSPSASVTVGLLQGRALDEGQINAIVHMVSSSVAGLPPSNVTIVDQAGRLLTQSDANGRDLNTTQLKYIQEVENRFQHRIETILAPVVGRGNVHAQVTAQVDFSRREETAEEYKPNQPPNQAAVRSKQTSASEQSGGPLVGGVPGALSNQPSAAPSAPIEKPKGNGDDKSAQGRNGNNSYERMISNNRNNRHDETINYEVDRTIRHTLLQAGGVERLSVAVVVNYATVQGENGPETQALTPEQLSQIESLTREAMGFSADRGDSLNVVNTPFNNTAEVIETLPFWQHPVLLEKLLELGRWLLLALVAWLLWRKMIVPQIARKRAAEKAALEAQKKQNKPATESNAEMDEKVRRQLARQRVNAELQSQRIRELAEKDPRVVALVIRQWMSNEQ

SEQ ID NO: 5629 - protein, 97 aa, Xenorhabdus sp.
MTLNKKQVQYLKSLAHSLKPVVMIGNNGLTEGVLAEIEQTLSHHELIKVKVAGEDREIKTLIAEAIVRETGAYNVQIIGKMLVLYRPSEERKISLPK

SEQ ID NO: 5630 - protein, 513 aa, Xenorhabdus sp.
VMDHRLLFPELRLSIINTNFIEIHPHLYARSMALLKVTSKIACMLSLSLSVFNANASSIEKNIEYLPAGANVSFIAQKIGEKAPIIDYRGQQLALPASTQKIVTALAALLQLGKDFRFVTTLESNANIEDGKLKGNLIARFVGDPSLTRTQLRNMVEKLKQSGIHQINGDLIIDISIFSSHDKAPGWVWNDMTQCFSAPPGAAIVDKNCFSVLLYSAEQANGPAIVHTPSYYPVNAFSEVKTLAKGSSEAKYCELDVTTGELNRYTLTGCLTQRDEPLPLAFAVQNGASYAGTILKNELRLAGIELKGHLRRQSFPQQPEKTLAVNQSAPLPDLLKVMLKKSDNMIADTVYRTLGHYYFNVPGTWRSGSDAVRQILKQKAGIDIGNAVIVDGSGLSRHDLITPSTMMEILQFIAQHNNELDIISMLPKAGFDGTLAYRPGLHTAGVDGKVFAKTGSLQGVYNLAGFMTAASGQQIAFVQFISSYSVTPENLRNRRAPLVRFEHHLYKSLYQNN

SEQ ID NO: 5631 - protein, 164 aa, Xenorhabdus sp.
MANKKRSASSSRWLQEHFSDKYVLKAQKKGLRSRAWFKLDEIQQSDKIFKPGMTVVDLGAAPGGWSQYVVSQIGGRGRVIACDLLPMDPIVGVDFLQGDFRDEQVLKTLLERVGDNKVQVVMSDMAPNMSGTPAVDIPRSMYLIELALDMCRDVLAPGGSFIVK

SEQ ID NO: 5632 - protein, 389 aa, Xenorhabdus sp.
MKFVDEARILVAAGDGGNGCVSFRREKYIPKGGPDGGDGGDGGDVYLLADENLNTLIDYRFEKSFRAERGQNGQSRDCTGKRGQDITIKVPVGTRIRDIATGEILGDMVRHEQRLMVAKGGFHGLGNTRFKSSVNRAPRQRTMGTPGETRDLMLELMLLADVGMLGMPNAGKSTFIRAVSAAKPKVADYPFTTLVPSLGVVRMDNEQSFVVADIPGLIEGASEGAGLGIRFLKHLERCRVLLHLIDLCPIDESDPVENARIIINELHKYSEKLAEKPRWLVFNKVDLTDPEEAKLKAKAIADELGWEGDYYMISAVNRQGVKELCWDIMEFIKVQPRHMNAEEGAQPEKVEFMWDDYHKEQLQQASEADDLDDDWDEEDEEGIEFIYKR

SEQ ID NO: 5633 - protein, 85 aa, Xenorhabdus sp.
MAHKKAGGSTRNGRDSESKRLGVKRFGGESVLAGSIIVRQRGTKFHAGNNVGCGRDHTLFALADGKVKFEVKGPQNRKFISIVAE

SEQ ID NO: 5634 - protein, 102 aa, Xenorhabdus sp.
MYAVFQSGGKQHRVSEGQTIRLEKLDIATGETVEFDQVLMVANGEDIQIGAPVIEGVKVKAEVVAHGRGEKIKIVKFRRRKHSRKQQGHRQWFTEVKITGIA

SEQ ID NO: 5635 - protein, 45 aa, Xenorhabdus sp.
MAFSQAVSGLNAAASNLDVIGNNIANSATFGFKSSSAAFADVFSG

SEQ ID NO: 5636 - protein, 223 aa, Xenorhabdus sp.
MSVLKFIGSVTFFLNLFSGCSLAWGSDLPRSINDYFRQIHHGTNYKVSVEIKTPEQQWPTCESPDIHPPMSNKNWGNISLPVNCGQQRRFMQIYVSVTGPYLVSNRAIQRNAVLTEKDFQSKTGHLDKLPNNIIHNKKAVKNGIAIRNIPAGQLITSNMIRRPWVIKAGQNVTVIVDGQNFRVRYEGKAINNAASFDNIRIRLVSGQVITGEAQENGSVKMML

SEQ ID NO: 5637 - protein, 94 aa, Xenorhabdus sp.
MSIERTQPLLAIAALQQRNSNEGVHSTRRTVAVAEKSADTQVKLSEAQKKLVQPSSQDINIQKVQQLKEAIAKGTLTMDSGKIADALIREALEN

SEQ ID NO: 5638 - protein, 134 aa, Xenorhabdus sp.
AHLNSLSITMAEEQRILSEGFIGANHLHRVTEQKTFLLSALDHSERKRQQLNETLKVSAPYADHEILVVLWDQISQTVERIRDLNAHNGFLLEQHIDQNSQAIAFLKSHHSPSFYGADGQARRNSALSGHKISV

SEQ ID NO: 5639 - protein, 230 aa, Xenorhabdus sp.
MAVTASINDSLDNSTIGELASSPKKKQDSNDIKDNFLNLLVAQLKNQDPTNPMQNNELTTQLAQISTVEGIEKLNKSLGAVVSQMEGNQAMQTTQLIGRKVMIPGDKILTGPSEDKGISVSTFGFELARPAEHVKVTIRNKSGVVVREIESKSVQNGIHKVNWDGKDADGKEVENSAYSFTVSASYRDQALVTLPLVSAEVNGVTRGEDGTKLDLGLAGTVTMDKVRQIL

SEQ ID NO: 5640 - protein, 136 aa, Xenorhabdus sp.
MGMSLLSIFDIAGSALSAQSQRLNVSASNMANADSIVGPDGEPYRAKQVVFRVAAPAGQEVGGVRVSEVVDDPTPFRLEYQPGNPLADEKGYVRMPNVDVVGEMVNTISASRSYQANIEVLNTTKSIMLKTLTMGQ

SEQ ID NO: 5641 - protein, 138 aa, Xenorhabdus sp.
MLDKLDAAFHFRQEALVLRNQRQEILSANIANADTPGYQARDIDFAAQLKKVMDHGRVTGNGIGLTLTSNRHIPIQPQQRLEMDLLYRVPHQTAMDGNTVDMDMERSNFADNSLKYQAELTMTNAQIKSMMSVLQSQG

SEQ ID NO: 5642 - protein, 239 aa, Xenorhabdus sp.
AKQGDRDAQYKIGMFYEKGVGIQQDYSEAVKWYNQAAKKGHAEAQFNLGSLYIEGRGISLNYTTGASWYLKAANQGHSDAQNNIGFLYKEGLGLKQDKQKALEWYLKAAMLGNPGAQNNLGMVYDEGEIVPQDYKKALEWYKKSAEQGFTTAQNNIGFLYQRGKGVSLDYNKAMEWYLKSATGGNEIGMFNIGYLYQNGLGVEKDEKQALEWYKKALAEDKDFTQAKLAVTKLTKKLNE

SEQ ID NO: 5643 - protein, 248 aa, Xenorhabdus sp.
MLKLEICCYSVNCALIAQEAGADRIELCAGPLEGGLTPSMGILKQALQCLSIPVHPIVRPRGGDFCYSKFDFEAMKNDVSFIRDMGFPGVSFGILNEEGKVDMLRMRQLMSLAGDMAVTFHRAFDMCCDPLYTLEQLTELGVKRILTSGQQSSAELGLHLLKELAQASRGPSIMPGAGVRASNISKFLEIGVKEVHSSAGKIVSSKMVYRKAGVRMNSEDREMEEYTNYSVDPELVESMKGVMILIDN

SEQ ID NO: 5644 - protein, 317 aa, Xenorhabdus sp.
MSPKKIILDCDPGHDDAIAMLLAHGNPDIELLAVTTVVGNQTLDKVTHNALSIARIANIRNIPFAAGCYRPLVREIKTAPDIHGETGLDGPILPEPEIKLDTRHAVDLIIDIIMEHPPKSVTLVPTAGLTNIALAVRKAPQIVERVKEIVLMGGGYHEGNRSAVAEFNILIDPEAAHIVFNEKWPLTMVGLDLTHQALATPEVTEEIAKINTRPAQFVLDLLQFYGKSYRMTQRGFDYPPVHDPCAVAYVIDPSVMTTQKVPVNIEMSGTLTTGMTVADFRFPPSEDCHTQVAVKLDQAKFWRMIIDALKNIGETDH

SEQ ID NO: 5645 - protein, 282 aa, Xenorhabdus sp.
IRKGIIKTILVSLIAVGLAGCERAKVPAGNVGIKVDLYGSDKGVQNEKLGTGKYWLSWNEEVYLFPLFKQLHQYQDPFLFQTSDSMSVSASVGIEYRVIEDKVVEVFKTYRAGVKEITDSNIRQLIADSLINHGSKMDIDKLSSGGKTQLLESVTTDLRKQLEPVGIEIQKVSWLGKMDYPNEVIDAINKKNRAVQEAQMRKNEVERSKAEADKMIEEARGQAESIRLKALAEADAIALRGEALRKNPEVLQLEAVNKWDGVMPQYLGSGAPMPFLQVEKKK

SEQ ID NO: 5646 - protein, 250 aa, Xenorhabdus sp.
GDKARIRNILKILMPWRKGPFSLYGVEIDTEWRSDWKWDRVLPHFSPLEGKTILDVGCGSGYHMWRMVGEGAELVVGIDPTQLFLCQFEAVRKLLGNDQRAHLLPLGIEQLPELKAFDTVFSMGVLYHRRSPLDHLWQLKNQLVSGGELILESLVIEGDEYQCLIPGERYAQMRNVYFIPSAEMLKTWLEKCGFVDVRIVDQAVTTTDEQRQTEWMKTESLADFLDPSDQRKTIEGYPAPLRAVLIARKP

SEQ ID NO: 5647 - protein, 568 aa, Xenorhabdus sp.
MEEKMIPPMAKKEPHEITIHGDTRVDDYYWLRDDQRQNKEVIDYLAAENNYTKEMLKSGQELRETLYNEMVGRMNKEDQSVPYTYNGYIYRTIYESGKDFPIYQRKPVDNSTDWQVMVDGNERAKGHKFYQIGGFAVTRDNKRIAITEDTQGRRNFQISFKNFGDSEWQNDVIENTSGNILWANDGKTLFYVRRDPQTLLPYQLFRHQYGTDTQQDKKIYQEDDDRFYLSISKSTSLDYILVSITSYSTSEYRLIDANNPQQEPQMFSARQAGREYYIDHFRGQFYIRSNYEHPLFGLYQTDAINKPWKTVIAPQDNTDLEDFSLFNKWLVVQERTKGLSSIRQIDWKTQQEKQVKFDDPAYMASLNYNPEPETDLLRYSYSSLTTPSSVFQWNMQTGERELLKQQEVKGFNKENYESQRIWIKARDGVEVPVSLVYSKSLFKKGQNPILIYGYGAYGISMDPYFSSALLSLLDRGFVYALVHVRGGGDLGRNWYLQGKLENKMNSFHDFIDTTKALIAEGYGDSKRVYAEGGSAGGLLMGAVVNQAPELYRGVIAKVPFVDAVTTML

SEQ ID NO: 5648 - protein, 216 aa, Xenorhabdus sp.
MEVSLQTEAIHKVEKQPIGIEQQLSVTSEQQESKIDAVNMPKLDVNEEAMLLVDKTKKKKPKEQDAPKKAQPVKRVQAKEQESEKSQSTAAPTTSTATADNITSRTAASYESNSDAVADAKAVWQAEVSGHLNRYKKYPSDAQRRKRTGRPTVKFTVNQFGNVIDSELVRRSGTNSLDREARLVLERAQPLPIPPDSILTNGSVTVELPVDFTLYQ

SEQ ID NO: 5649 - protein, 256 aa, Xenorhabdus sp.
QSGVLLDMRTGKAITSDELLNQLATYPKIIIGEKHDNPYHHQIELWLVQQLEKKRPHGSVLLEMINPDQQERVNKVKSWLQDDPIVRDERIKQLLAWQEGWPWEQYGKLVVELVKAPYPLLAANLNRSEIDRAYKSYKAGDKTSLVSEDVKKRIDETIKNSHGGNIDELHLSAMSKIQQLRDQRMAEQLMKAPSPAMLFAGGYHAVKAMGAPQHVKKVASDEQVVVLVIAEKGVVLNKEYADFVWFTPKVTTKVTK

SEQ ID NO: 5650 - protein, 279 aa, Xenorhabdus sp.
MRIKKQGLHIEAGKDFEVVNNENDPRFKEYWQEYYQLMKRRGVSQDQARRTVIGNPTLIGAIMVHRGEADGLICGTVGSYGEHYQIIKDVFGFRQGVHTAGAMNALLLPMGNTFIADTYVNEDPTPEELAEITLMAAETVRRFGIEPKAALLSRSSFGSSDCESAQKMRKTLELVQQMAPSLEIDGEMHGDAALVESIRRDIMPDSPLKGSANLLIMPNMEAARISYNLLRVTSSDGVTVGPVLMGVSKPVHVLTPIASVRRIVNMVALAAVEAQTNPL

SEQ ID NO: 5651 - protein, 516 aa, Xenorhabdus sp.
MDEKLKQSALDFHEFPQPGKITVTPTKPLTTQRDLALAYSPGVAAPCLEIAEDPLAAYKYTARGNLVAVISNGSAVLGLGNIGALAGKPVMEGKGVLFKKFSGIDVFDIEIDESNPDKLIDIIAALEPTFGGINLEDIKAPECFYIEQKLRERMKIPVFHDDQHGTAIICTAAVLNGLRVVNKDISKVRMVVSGAGAASIACMNLLVALGLKRENIVVCDSKGVIYRGREENMEKTKADYAIEDNGSRTLADVIPDSDIFLGCSGPGVLTPEMVKTMAKDPLIMALANPEPEILPPLAKAVRPDAIICTGRSDFPNQVNNVLCFPFIFRGALDVGATTINEEMKLACVHAIADLALAEQSQEVASAYGDQDLFFGPEYIIPKPFDPRLIVKIAPAVAKAAMDSGVATRPITDFGAYIEKLNEFVYKTNLFMKPIFSQAKKEKKRIVLAEGEDIRVLHATQELVSLGLAYPVLIGRPTLLKCVSRSRGFILKQVKTSKSLITKTIHVSKNTGRNITN

SEQ ID NO: 5652 - protein, 178 aa, Xenorhabdus sp.
LKHIVEVMISEQEVKQRIAELGQQITEHYRNSDRELVLVGLLRGSFIFMADLCREIQVSHEVDFMTASSYGNGMDSTRDVKILKDLDEDIRGKDVLIVEDIIDSGNTLNKIREILSLREPNSLAICTLLNKPSRREVDVPVEWIGYSIEDKFVVGYGIDYAQRYRHLPYIGHVTLLEE

SEQ ID NO: 5653 - protein, 308 aa, Xenorhabdus sp.
MAYALELTQLTKTYNGGVKALRGIDLRVETGDFYALLGPNGAGKSTTIGIISSLVNKSSGKVNVFGYDIDTDLVNAKRQLGLVPQEFNFNPFETVIQIVLNQAGYYGVPRNVAQSRAETYLSQLDLWGKRNERANRLSGGMKRRLMIARALMHQPKLLILDEPTAGVDIELRRSMWDFLKSLNEQGTTIILTTHYLEEAEMLCRNIGIIQHGELVENTSMKDLLSQLEVETFLLDVAPEGNMPTLEGYSYRLVDTATLEVDVKRGQGLNDVFSQLSTQGIQIHSMRNKANRLEELFVGLTNNSQGARS

SEQ ID NO: 5654 - protein, 250 aa, Xenorhabdus sp.
VALKTIWIKEITRFGRIWVQTLLPPVITMSLYFVIFGNLVGSRIGEMGGFTYMQFIVPGLIMMSVITNSYANVSSSFFSGKFQRSIEEILVAPVPTHVIIAGFIGGGVARGVCVGILVTLVSLFFVPLEIHSWGMVVITLLATSILFALAGLLNAIFAKTFDDISIIPTFILTPLTYLGGVFYSLTLLPEFWQMVSKLNPIVYMISGFRYGFLGIADVSLAMTLGMLGVFILGFYLLAWYLIESGRGLRT

SEQ ID NO: 5655 - protein, 216 aa, Xenorhabdus sp.
MRKIEELFARNKQWSESVNEENPHFFKELSKAQKPHFLWIGCSDSRVPAEKLIDAAPGDLFVHRNVANLVIHTDLNCLSVVQYAVDVLQVEHIIICGHYGCGGIEAAVNGTELGLINNWLLHIRDLWYKHSSMLGELPPNDRLNRLCELNVIEQVYNLGHSTIMQSAWKRGQKVMIHGWVYGLKDGELHDLDITADSREKLELNYRQAISKLARKK

SEQ ID NO: 5656 - protein, 48 aa, Xenorhabdus sp.
VKGPYVHTVKHQGLLYISGLTALGTESQQHGVEAQTLTILQQISSIIE

SEQ ID NO: 5657 - protein, 141 aa, Xenorhabdus sp.
HGRKECRHVMQIQAALPEELQQQWPSIQSVIEVVSERSTKGQPAHRDSRWYVSSLPLDAETAAKAIRRHWAVENELHWVLDVAFREDNISLKDPDGAAQMALFNRIALNVIKQNTSIKDSQAAKRRRATWSGEFRSQLIFD

SEQ ID NO: 5658 - protein, 1342 aa, Xenorhabdus sp.
SNFQSSTEGSVDPRTGLFNYMMPVAHLIGNNQLGPELTLALAYSPLNSADIGFGIGFSLGLTHYDSDTKMLQLSTGERYKVDETDKAVTLLQYKQDVVRFEKNGAEDAYQVIHKSGQVEILSGPKNAFNLKVPVKILNPLGHSLQLEWDYTAGAVPHLTGIYDLDKKHRALLTVRTIPGVATRLTVWPGMSEMYEIELALHNGRVSTITNLTAGQTLIWSLDYDLHCQFLNRVMAPTGLLEAVTYTQDGHRFPAKGPATALPYVTRYSQSSGQGDENVRTYTYTKNNFLGSGTGGDWSRNQDYLYGVLSDYQYGSTERWDNGQAVRVISRCYNNYHLLISETVQQNHCIRQHETEYYAQIGKEFAQQPPQFQLPKSATVRFIAGNGQREEVTRTEFDAAGNPTLQIAPDGTRTVWVYYPAKGEVTRLDDDCYGCPADPHGFVRYVKSKTVTPGVASPIGAYDDAPLHEVIYRYDSLPTLPGTATKAAVVRTHQCLFRVDRHTGQRQLLHTHQTGYVSRPHSRHYGRVDSLAQTVYDGQNAGQGYTQRQVFHYQLDKQHLKQTTHWTSEHDGLTASSVQIHSCFSRKVGFEQDHQGCTALYEYDAFGRLSKQLNNAGTAGATHRSMAYRYSLRGKLIAYKDVARKWHRLRFDILGRPVEVVDDAVIVTLRYDSAGRADSWTVKDKTIGKQLTTTITFDDFSREIGRQIDSETDVLTLSQTYTVAGQLASRITDSKQAGRLREEYYTYDIARCWLTDYRCSGLECPRDAYGQSLNRQQFTYDRLGNLLTCLTTLADGSQDMAHFSYANPADPCQLTKITHNHPAYPATITLTYDKAGRLVMDEANRMLAYDGLGRLASVTQAGSTQTYGYDASSLLILQRRGKADTRELYYQGANRVAEIQRESGTVTRLVHVQGVPTATVTDNSVHLLGTDEPGSVLLSHQQGTESRFRYTPYGQQAAADSDPDLPGYNGERQDPLGGGYHLGNGYRTYNPVLMRFTAPDSLSPFEAGGLNPYAYCLGDPINRTDPSGHMSVGSILGIALGLFGMAAELAAAIPTGGASLTLSGAIIAGIGFLGAATGIASAATEDSDPQASAVLGWISMGLGAASLGSLVLGKMVGGLRQAEAQLQNSFSSGARTAVAAGESEIPRTIEAVTAETTIATETANTTRATATAETTARSTLESFDRANAAGWVQEVMSNERTTVQFNFPPHAQMTEIMKQDYDVLRRLGFTYLVEGGGIRLTMDNSVLLDAGGRTVQRFINIESRTVRELYAPFINEINPRAVNTISRFRYEEGVNRLVYNVNRHQGIFIDPRFDDFFLGVSRWNMRWREANLPGMPADLLRLL

SEQ ID NO: 5659 - protein, 54 aa, Xenorhabdus sp.
VRPADIAGLMRVQQLALSGVPVHPEQTLMRTHHRRFGRGPRQRGQGIITVNHLM

SEQ ID NO: 5660 - protein, 273 aa, Xenorhabdus sp.
LKEREPYVNGLEAILVPDTGIVNYPEIAAKLAEIIQIRGGDIHCQQSVQTIREHSDSIEVQTQQRTYQAKWLVNCAGLQSDRIAQLAGYDTGMKIVPFRGEYYVLNSDKNHLVNHLIYPVPNPDFPFLGVHFTRMHNGKRDVGPNAVLAFKREGYRRADCNLRDMAEILTYKGVWKIASRYFSEGIAEMRRSFSHQLFTENARQLIPDLRPEDITPGPAGVRAQAVTPEGKLVDDFHFVTGRRSLHVCNAPSPAATASFEIGRELVKRYFELI

SEQ ID NO: 5661 - protein, 83 aa, Xenorhabdus sp.
VIIIGAGLVGLGTANALQEQHPHLRLLVLDKEKYVATHQSGHNSNVVHSGIYYTPGSLKANLAKKGNQTIYQFLPGNHEAYHY

SEQ ID NO: 5662 - protein, 654 aa, Xenorhabdus sp.
MSIAPLTSSTAELDKESGSGNRHLISPYKQIATLLAIAISLYAIYANALSNTQEFYRNVIFLGGILVLGFILFPVSRQQATAKLNLWDYLVILLTLISYGYFYFTYIDLHVVRNSIPNTTDYVMAIVGIALLLEAARRTTGYFIPGLSVFAIVYALFGQYFIGIFGHAGFSIERLLYRLFMTGEGIFGITLSTASTAIIVFILFGSFLSVSGATALFNDLALAIAGRRRGGPAQVAVISSALTGSLSGSAVANVATTGTFTIPLMKSIGLSPRFAGAVEAAASTGGMIMPPIMGAAAFIMAGFLGISYTTIVLAAIIPAMLYYASLIIAIDLEAKKQGLKGISKESIPQVRAVLKARGLLLLPLFIVIGTLLAGKTPIYAGFLGIIAIIVASWITPDTSVRMTPKKIANALNEAARGAIQVTVACAAIGIIICVVTMTGIGSTLAFNIVSLTDNTLWMILLVVMVVCIVLSMGLPSTALYIVVAVTVSPILIKAGVLPLAAHFFVFWFGALSNITPPVALASYTAASIARSDPMQTSWSAVRLALPGFIIPFILVYNPALLMQGSELSVLSILYMLITALIGIYSLSIATANFWMIKAHWLERIFFTIAALLLIKPGVLTDLAGMALIMLSGVIHLLRYKQYRTTAIRKEPHNV

SEQ ID NO: 5663 - protein, 134 aa, Xenorhabdus sp.
MYASGVSARILNVTDQQLKQINAIANSWFRFVIQPETYPRQSATVHTIAQPNILMTTREIDEKIVYELTKSMFENLKEVHQIHSAAKYISPENALKGVAVPLHPGAYRYYREIGLPIPDELIPPEIHAATAQPQ

SEQ ID NO: 5664 - protein, 201 aa, Xenorhabdus sp.
MAIIGKMKNADKRFLSVATASTGGTFYPIGVGLANVWSHHLKDENIQVTGQSSAGSIENIDLLQKNEAQLVILQSLIAVEAYQGVRNFENRPYQDLRSISVLWPNVEHFVMMDDKIKEGTLNDIANTRFSVGPQASGTEQSTLIILQGVNLSKKSISPEYLGYSDTVSAMRDAVLMVAQYLRGFPPQRSRICTPAVSLPVS

SEQ ID NO: 5665 - protein, 123 aa, Xenorhabdus sp.
MIQEQTMLNVADNSGARRVMCIKVLGGSHRRYAHVGDIIKITIKEAIPRGKVKKGDVLKAVVVRTKKGVRRPDGSVIRFDSNACVLLNNNSEQVIGTRIFGPVTRELRNEKFMKIISLAPEVL

SEQ ID NO: 5666 - protein, 104 aa, Xenorhabdus sp.
MAAKIRRDDQIIVLTGKDKGKRGKVKQVLSSGKIIVEGINLVKKHQKPVPALNQPGGIVEKEAAIQVSNVAIFNAETGKADRVGFRFEDGKKVRFFKSNNETIK

SEQ ID NO: 5667 - protein, 179 aa, Xenorhabdus sp.
MAKLHDYYKDEVVQKLMSQFGYHSVMQVPRVEKITLNMGVGEAIADKKLLDNAAADLAAISGQKPLITKARKSVAGFKIRQGYPIGCKVTLRGERMWEFFERLISIAVPRIRDFRGLSAKSFDGRGNYSMGVREQIIFPEIDYDKVDRVRGLDITITTTAKSDDEGRALLAAFNFPFRK

SEQ ID NO: 5668 - protein, 101 aa, Xenorhabdus sp.
MAKQSMKARDVKRAKLAEKFFAKRVELKAIISDVNASDEDRWNAVLKLQTLPRDSSPCRQRNRCRQTGRPHAFLRKFGLSRIKVREAAMRGEIPGLKKASW

SEQ ID NO: 5669 - protein, 130 aa, Xenorhabdus sp.
MSMQDPIADMLTRIRNGQAANKVAVTMPSSKLKVAIAKVLKEEGYIEDFKIEGDTKPELEVTLKYFQGKAVVESIQRVSRPSLRIYKKKDELPQVMAGLGIAVISTSKGVMTDRAARQAGLGGEILCYVA

SEQ ID NO: 5670 - protein, 177 aa, Xenorhabdus sp.
MSRVAKAPVVIPAGVEVKLNGQVISIKGKNGELSREIHSAVEVTHADSQLTFAPREGFADAWAQAGTTRSLLNAMVIGVNEGFTKKLQLVGVGYRAAVKGNTVSLSLGFSHPVEHQLPAGITAECPSQTEIVLKGADKQVIGQVAADLRAYRRPEPYKGKGVRYADEIVRTKEAKKK

SEQ ID NO: 5671 - protein, 117 aa, Xenorhabdus sp.
MDKKAARIRRATRARRKLQELGATRLVVHRTPRHIYAQVIAPNGSETLVAASTTEKAISEQLKFTGNKEAAAVVGKIVAERALEKGIKNVSFDRSGFQYHGRVQALADAAREAGLQF

SEQ ID NO: 5672 - protein, 166 aa, Xenorhabdus sp.
MAHIEKQAGELQEKLIAVNRVSKTVKGGRIFSFTALTVVGDGNGRVGFGYGKAREVPAAIQKAMEKARRNMKTVALNSGTLHHPVKGAHTGSRVFMQPAHEGTGIIAGGAMRAVLEVAGVRNVLAKTYGSTNPINVVRATLDALDSMKSPEMVAAKRGKSVEEILG

SEQ ID NO: 5673 - protein, 61 aa, Xenorhabdus sp.
MTMAKTIKITQVRSSIGRLPKHKATLTGLGLRRIGHTVEREDTPAVRGMVNLVSYMVKVEE

SEQ ID NO: 5674 - protein, 144 aa, Xenorhabdus sp.
MRLNTLSPAEGAKHAPKRVGRGIGSGLGKTGGRGHKGQKSRSGGGVRRGFEGGQMPLYRRLPKFGFTSRKAMITAEIRLSDFARVEGDVIDLNALKAANIVGPQIEFAKVMLSGEVNRAVTVRGLRVTKGARAAIEAAGGKIEE

SEQ ID NO: 5675 - protein, 340 aa, Xenorhabdus sp.
MAKQPGLDFQSAKGGLGELKRRLLFVIGALIVFRIGSFIPIPGIDATVLAKLLEQQRGTIIEMFNMFSGGALSRASIFALGIMPYISASIIIQLLTVVNPRLAEIKKEGEAGRRKISQYTRYGTLVLAIFQSIGIATGLPNMPGMQGLVINPGFAFYFTAVVSLVTGTMFLMWLGEQITERGIGNGISIIIFAGIVAGLPPAIGHTIEQARQGDLHFLLLLLVAVLVFAVTFFVVFMERGQRRIVVNYAKRQQGRRVFAAQSTHLPLKVNMAGVIPAIFASSIILFPGTIASWFGSGANWNWLTTISMYLQPGQPLYVLLYASAIIFFCFFYTALVFFRA

SEQ ID NO: 5676 - protein, 466 aa, Xenorhabdus sp.
KAGISGKLFLAIFATCMLVLVTMHWGIRLSFQYGFIGYIQQNSQLRARMLAEALTEQYQQYGNWNFLTQNDRAIFKIIQNIEQNSDNRQELSPRAWRSQFWVVDSHMHRLVGHSDNMSEETYRVPVNYQNKVVGWVIVSTSDKITRQADIRFAQQQQLTSWIIAGFSTMLALIATFVLSRIFLKPVKRLVEGTHKLASGDFSVRVASSDQDEIGQLASDFNHLACTLEKNEQMRRDYMADISHELRTPLSILRGELEALQDGVRQPTAETIQSLLTEVTILTKLVDDLHLLSLTDRGSLTYRKERVNINELLQIAVAVYRGRFADKQISLELYLPQNTIVFADPKRLAQLFHNLLENSLRYTSDHGTVLIHGYVSQQKWVLNWQDSAPGLTTEQCQHIFERFYRCESSRNRASGGSGLGLAICYNIIEAHNGLIYAEISPLGGIHIHIELPLFKFPEQKTPNKILK

SEQ ID NO: 5677 - protein, 365 aa, Xenorhabdus sp.
LLSDDSEALRKWTPIIQKALKTLPQLTGVNSDDDDKGSELAITYDRDLMARLGISVAQANSLLGNAFGQQPISTIYQPLNQYKVVMEVAPEYNQYISALEKIFVINKEGKRIPLSYFASWRPANAPLDIYHQGLSAASTISFDIAEGYTMSDAVSAIERTMTELSVPSAVRSSFGGTVQDFQESQRSQLLVILAAIITVYLVLGVLYESYIHPLTILSTLPSAGIGALLALELFNTPFSLIAMIGIMLLIGIVKKNAIIMVDFALEAQRNGQLSAREAIFQASLLRFRPIMMTTLSALFGALPLVLSNGAGAELRHPLGITIVGGLVMSQILTLYTTPVVYLSFDRLREKWQQRRLAKFQRIKSL

SEQ ID NO: 5678 - protein, 615 aa, Xenorhabdus sp.
VIGVSAYMPGASPETMASSVATPLERSLGRIAGVKEMSSSSSLGYTFIYLQFELNRDINGAARDVQAAINAAESLLPSGMPSRPTYRKANPSSAPIMILTLTSDSYGGGQLYDIASTRLAQKISQIEGVGQVSVSGSSLPAIRVELNPNALFSKGISLDDVRTAVNNANVRNPTGHVETSEYNWQIQTNDEIKKADDYASIIVDYRDGSPVRLKDLATVKESVEDIRASGMSGNKPAIALIIRGEQNANIIETINKIRAELPTLRTSIPANIKLTVVQDRSPTIRASLYEVERALALAVALVILVVFLFLRSGRATLIPAIAVPVSLIGTFTAMYLCGFSLNNLSLMALTIATGFVVDDAIVVLENISRHLEAGMKPAQAALKGVREVGFTVLAMSLSLVAVFIPLQLIDEMLGRLFLDFSVTLATAIGISLFVSLTLTPMMCAHLLKSSPEKSLKKTRGFGKVFLRFQQYYGRSLNWVLNHTRWVLLMLIGIIILNGWLYINIPKTFFPRQDTGQLLGFVVADQSISFQAMQKKMEHFMQVINADPTIENVTGFTGGDSMNVGFMFMSLKPVSERKESIDKVIQRLQDKLSRRAGGFTVSDPCAGSQIRWRRRW

SEQ ID NO: 5679 - protein, 559 aa, Xenorhabdus sp.
KADIKHNRFEQSCEHFFEWIIAIYSVWLKRVLNHPWLTLGVTLGTLALTALLYVVIPKGFFPSQDNGLIQSTLEAPQSISFSAMADKQRQVSELLLQDPSVENVTTFIGVDGSNPTLNNGRLQITLKPFDQRHDRIEDIIPRLQARIAKVPDITLYLQPIQDLTIDTQLSRTQYQFTLQATSLDELNIWAPKLQEALKKRPELVDISSDLQNKGLVAHINVNRDMASRLGITISAIDNTLYNAFGQRMISTIYTQSNQYRVVLAQDTTHSPGIDALNDVRLLSADGNIVPLTAIATIEQRLGYLSINHLQQFPATTFSFNVAQNTSLEAAVNAVKETEHAINMPKDINTQFQGATLAFQNALSNTLLLILAAVVAMYIVLGILYESFIHPVTILSTLPTAGVGALLALMLGGYELDIIAIIGIILLIGIVKKNAIMMIDFALAAEREKGMSPYDAIFQACLLRFRPILMTTMAALLGALPLMLSSGIGAELRRPLGVSMVGGLIMSQILTLFTTPVIYLLFDRLAHYYRNRQGRNKQSRYQDDNQTTLARSSTDHQEPL

SEQ ID NO: 5680 - protein, 257 aa, Xenorhabdus sp.
LCVTLIQTDLFWEDAEKNREHIEGYITQLVESDLIVLPEMFTTGFSMKPQAIAETMDGPSILWMKKLAAEKNCAIVGSMIITENQQFYNRLLWVNADGSIAYYDKKHLFTFAHEDHEYTAGNTPLIVEYRGWKIATFICYDLRFPVWSRNTNEQYDAALYIASWPARRSLHWRTLLQARAIENQSYVIGVNRVGQDGNQLDYTGDSMLVDPLGEILLHEKETEAVKTMTISLDHVRETRERFPFLKDADPFAFPPSF

SEQ ID NO: 5681 - protein, 183 aa, Xenorhabdus sp.
MIRALVETGLTFSATDDFDITPVDYIAQASLYAILNIDKFNGKTLHLTTPNPITYNDIVAFLREFGYRIETIKNEVYMEALAQSCLYLNGQPYRSVFTDLLALVHGGGEMNETAKYATEITTDLLSGSGIQCPPSDKKLLSCYVNYLIENNFIPSPQQQGEQAEIRSLSAGSGYMENLFDADL

SEQ ID NO: 5682 - protein, 229 aa, Xenorhabdus sp.
GYQVAATDISIQKLTLLKERLGQPESLAIFEMDVTDPASVEQAAQQITETWGKTITVLVNNAGIIHRTFCLSGQGLPEVAKMIDVNLTGAFNCTSIFVRYMAAQKYGRIINIASIAGIWGAAGGAAYGASKAGLISATESWGRELGPLNISVTAIAPGVCKTDMLEQFVNSSPMESAAEDKIVRSIVPVGRWGTSDDVAEVVGFLASCKTNYLNTAVIPLDGGMRVGTI

SEQ ID NO: 5683 - protein, 642 aa, Xenorhabdus sp.
EITLLEKQIFHKPLSDIWQETIDYFHSTHQPDIIAKAEKQPKKKMALVFQWYLGQSSRWAITGDPVRNMDYQIWCGAAMGAMNEWLKGTPFEAVENRHVSDIARLLMNGAACLTRIALLELLNVAVPEQIKQHLLLSHGPYSSKQCVTEQNVTEQSVSEKIVTKQMPDQKIESNQKTEPDQKSKVRSKESMDASTKLCLDNSKSFYKKCWDLMPGGSHYNFGDPERPLVIPFNRGEKSRVWDLDGNEHLDMFCKFGALLVGHHNEAYNSSLIEYMNKVTSVDTCDLEVAVCETMVRHIPCAEMVRFCLSGTEAVQNALRLARAFSGKNRFIRFHGHYHGNADNIMGWRKKQDLTYPVPEQFRGDLLDTLGRDPNVMTDQSFMLPWNDIDILTATIERYHDEIGAVLMEPICINGGGIFPVEGYLEKTKALCEKYNIVLIFDEIITGVRIGLGGAQKILGVTPHLATFGKALGGGAMPISAIAGRRDIMNLYTRGKVIHAGTFNGYPLGLAAIKTTFSLIEQDPGCYDRMGDIMRQISNIFVKAAEAVDLPLVVQGMPTALVYHSQNTPVMSTEGYSDKVKFCDIIIREISKRYGIQFSPLSRMYPNLLMSQDDVRFFEERIFDAMENARKVIDIAFKEGITG

SEQ ID NO: 5684 - protein, 144 aa, Xenorhabdus sp.
MLPLVALSQTEIDAIVATVPGGAANVQDIYPLSPLQEGILFHHLLQIQGDNYLLQSLLAFDSRERLDAFLSALQQVIDRHDILRTAAYWQDLVQPVQVVWRQASLNINIFTPATEIDIVTQLRAHTDPRRYRINLDRAPLFTAD

SEQ ID NO: 5685 - protein, 139 aa, Xenorhabdus sp.
MPDSDNDQAVRLDKWLWAARFYKTRSTARDMIDGGKVHYNGQRGKPSKLVELNAVIKLRQGSDERTVIVLALSSQRRGATEAQQLYQETEESIIKREKMALARKMNALTMPHPDRRPDKKERRTLIKFKNTKLNESGHS

SEQ ID NO: 5686 - protein, 285 aa, Xenorhabdus sp.
MIKHDQLHRFLFESHSVRGELVTVSETYQRMLENHDFPQPVQQLLGELLVATSLLTATLKFNGDITVQIQGDGPVKLAVINGNNQQQMRGTARIDGDISAESSLRDMVGNGYMVITVTPTEGERYQGVVALEGETLAECLDAYFRQSEQLPTSLFIRTGVQDGKMAAGGMLLQSLPSAQTGDVDMLDHLVQLTTTIKGEELFTLDIKEILYRLYHEEDVTLYEPQQVEFRCGCSHQRCADTLATLPEEDLQDILHKDGKIDMECEFCGMHYIFDEKAINKIKEVK

SEQ ID NO: 5687 - protein, 36 aa, Xenorhabdus sp.
VLGISQREPVSLVVIPGAVQIPGCLASLHSGYHRLS

SEQ ID NO: 5688 - protein, 365 aa, Xenorhabdus sp.
MNSALINLMKTQFRQYIREPEILFWSFGFPLLLVWLLGLSFSSQDIPERYIGIVLPAEVAEQQKIKQWGEQFTAHEHTISGIINQDEIKRNNLVKVKYHIKYYPDREAVILGLKRGDIQMFIEQNAQGKQIHYLDPQDGDALLTYYLLNQQEGKPTDKNLFILETPGLRYLDFLIPGLLAMAIMETCLIAVGWALAEKRLARVTRQMCITPMRKTTFLMAHILACLIINFVEILIIYQFAKIYFDIEIQGSFYAFLLLLFAGNICFSGVAVLVASRARKAQTANGLLEVSILIQVLLSGIFFSYKHFPQWMVNIVEYLPLTILADNMRKVFIEGGELLQVVPASIALVVIGVMTFILGMRIFRWY

SEQ ID NO: 5689 - protein, 315 aa, Xenorhabdus sp.
MAIQKQEEKVIEFNQVRKHYKDYQALKGISLDVYRGEFIGLLGPNGAGKTTLVEILEGLKKADSGSVRVLGKTWQHDAPYLRRRLSGVLQETLFINKLRVKEVLTLFGSFYGCSRHRVQEVMELVELSEKHRTYVEGLSGGQRQRLALGVAIMNEPEILILDEPTTGLDPRFPHDTWDILRKLNREKKSTMLLTTHYMEEAEYLCDRICIMNKGEIIAQGGMDELLKKYCNGDLIELTTRFPERLQELSLHNRVSSYEYDESKNRIRMIIDDSASFVTELFECAKKAGTDINELVIRKKTLDDLFMVLAGRRFHE

SEQ ID NO: 5690 - protein, 497 aa, Xenorhabdus sp.
PLGYAQHCFWFVSTALGDTANNQVGILIEGELRIAVLEQAINTLIQSHISLRTEILDYAPMQRLCQMQEFDLPLLDLSAYDADKQEQRVIEHSQKCLHTPFNFKSPPHLRAQIFRLAESKHLLFLCFPHIVADGGAIHLFEQQLWRLYEQGCHGKKLQLGVSDQMQIDEWVVYERETHHQHGQQDLAFWRQHLKGYPYARFPARYLNQNTLTDHEFYLPFPENSYDLLDTLAKQQKATLQMVFLTLVAEVIYTMTGQSRFSLNSVLEGREQPGSETLMAPMLRVMPVPVNLDSLKDRTGKNEATTITLLEQVREKILSAYDHMECPWSLPVGVLAEQRWHRSPGIYSLAIRAGSWLYSKVFRRARLYPHFLADFLFMEPRPPQSIIRRARRSVEISQPTININILQDVFKSETSGSRLDGLRLSSYWKSEHREHQALPGQAISTQWENDSINIYVTLSEDSKPIMQINCCCFNQAGMAYFTGLLKEKLSSLSQLITE

SEQ ID NO: 5691 - protein, 140 aa, Xenorhabdus sp.
MSQSPIELKGSNFTLSVVHLHDDQPDIIQKAIQEKLEQAPEFLKNAPVVINISHLPAGADLLALHRVVESSGLRIVGISGCQDEEQRKIVLESELPLLKEGKSQKIRTEENKPPEPIFKKTRIINTPVRSGQRIYAPNSI

SEQ ID NO: 5692 - protein, 511 aa, Xenorhabdus sp.
SLFHPFLVRNDQPLPKPTTPMPSLDLLAAPPAEEEPVDMFALEQTSRLIESRLNDYRVKADVVGFSPGPVITRFELDLAPGVKASRISNLSRDLARSLSAVAVRIVEVIPGLPYVGLELPNKKRQTVYLREVLDCEKFRDNPSPLTIVLGKDIGGQPVVADLGKMPHLLVAGTTGSGKSVGVNAMILSILYKAKPEDVRFIMIDPKMLELSVYEGIPHLLTEVVTDMKDAANALRWCVNEMERRYKLMSALGVRNIAGYNDKIKQAEQMGRPIPDPFWKPGDSMDVEHPVLKKEPYIVVMVDEFADLMMTVGKKVEELIARLAQKARAAGIHLVLATQRPSVDIITGLIKANIPTRIAFTVSSKIDSRTILDQGGAESLLGMGDMLYLAPNSSIPVRVHGAFVRDQEVHEVVNDWKARGRPQYIDSIIKGGEDGEGGLGLDSDEELDPLFDQAVEFVIEKRRVSISGVQRQFRIGYNRAARIVEQMEAQQIVSTPGHNGNREVLAPPPHEH

SEQ ID NO: 5693 - protein, 203 aa, Xenorhabdus sp.
MKKLMLIGCLMMGLSVSSAWADAAHDLQERLSKVNSFHANFTQTVTSNDGSAIQNGEGQLWVKRPNLFNWHMTSPDESTLISDGKTLWFYNPFVEQVTANWLKDATGNTPFMLIARNDSADWKQYKVTQNGNHFELTPKSASRNLKYFSITVTPDGTIQKFTAVEQDGQKSAYQLKGQQNTSVDASKFKFTLPEGVTLDDQRQ

SEQ ID NO: 5694 - protein, 447 aa, Xenorhabdus sp.
LNNLSLDFSQNEFQPLAAKMRPITLDHYIGQQHLLAEGKPLPRAIRAGQLHSMILWGPPGTGKTTLAEIIGYYAQADIERISAVTSGIKEIRESIEKARQNRNAGRRTILFVDEVHRFNKIQQDAFLPHIEDGTITFIGATTENPSFELNSALLSRARVYLLKSLSPAEIEQVLTQAINDKERGLGGQNIVLPEDTRQILAELVAGDARRSLNLLEMMSDMAEIDAKGQRTLTTELLKEVSGERSARFDNKGDRYYDLISALHKSIRGSAPDAALYWYARIITAGGDPLYVARRLLAIASEDVGNADPRGMQVAIAAWDCFTRVGAAEGERAIAQAIVYLACAPKSNAVYTAFKAAMADAQEKPDYDVPAHLRNAPTKLMKEMGYGEAYRYAHDEPNAYAAGEIYFPPEMQKTTYYHPTNRGLEGKIGEKLNWLMAQDQNSPIKRYR

SEQ ID NO: 5695 - protein, 429 aa, Xenorhabdus sp.
MLDPNMLRNELDAVAEKLARRGYTLDVETVRKQEERRKVLQVETETLQAERNSRSKSIGAAKARGEDIEPLRQEVNQLGEKLDTAKAELEALQVEIRDLALSMPNIPDDSSPDGKDDSDNVEISRWGEPHQYNFEVKDHVSLGELTDGLDFAAAVKLTGARFVVMKGQIARLHRALAQFMLDLHTEQHGYLETYVPYLVNHDTLFGTGQLPKFGEDLFHTKALEEESGSNYALIPTAEVPVTNLVRGEILDEKDLPLRMTAHTPCFRSEAGSYGRDTRGLIRMHQFDKIELVQIVHPEKSMEALEELTGHAEKVLQLLNLPYRKMLLCTGDMGAGARKTYDLEVWLPAQNTYREISSCSNTWDYQARRMQARFRSKDDKKTQLVHTLNGSGLAVGRTLVAVMENYQQEDGRIEVPAVLRPYMNGLEYIG

SEQ ID NO: 5696 - protein, 130 aa, Xenorhabdus sp.
MIDFILASQEVNPDPLLLIQAIPSFMWACLVFCVFAIIALAFIWFAPALIIINNLKFGDAVSMSLSAVKKNLFGGFLFFLLMGIMMFASAIPLLLGFIITLPMSLIVYYTTYRSIFYAQEEKQTQSDLIV

SEQ ID NO: 5697 - protein, 246 aa, Xenorhabdus sp.
MPVLGRIHSFESCGTVDGPGIRFIVFFQGCLMRCLYCHNRDTWDTHTGKAVTVEELIKEATTYRHFMNASGGGVTASGGEAILQAEFVRDWFRACHAEGIHTCLDTNGFVRRYEPVIDELLDDTDLVMLDLKHLNDDIHRELVGVSNHRTLEFARYLAKRNQKTWVRYVVVPGWSDDDKSVHMLGEFTKDMKNIEKIELLPYHELGKHKWIAMGEEYKLEDVKPPSKETMERVKEILMSYGHQVIY

SEQ ID NO: 5698 - protein, 200 aa, Xenorhabdus sp.
MVLVTRQAPDFTASAVLGNGEIVNNFNLKKHLNGRPAVIFFWPMDFTFVCPSELIAFDHRYEEFQKRGFEVIGVSFDSEFVHNAWRKTPISEGGIGEVKYPMVADIKRDIMKAYGIEHSEAGVALRGSFLIDKNGVVRHQVVNDLPLGRNIDEMLRMVDALQFHEEHGEVCPAQWAKGQEGMGASPEGVAKYLTKNADKL

SEQ ID NO: 5699 - protein, 591 aa, Xenorhabdus sp.
QEENMSKTWKIPFIVASLFVSSSLYAATGLAVEAKQGMVVSAQHLASQVGVDILKMGGNAIDAAVAVGYAEAVVNPCCGNIGGGGFMTIHLADGTDKFINFRETAPAAASADMYLDKDGNVIKGASLYGYYAAGVPGTVMGLDTALQKYGTLTREQVMAPAIKLAREGYTLTRGDTDIMDTTVKRFAQDPEAARIFLRKDGTPFQPGDKLIQTDLANTLEMIAKQGPDVFYHGKIPQIIEETSKKSGGIITAADFANYTITETTPVTCSYRGYKFISAPPPSSGGVTLCEILNIVEGYDLKSMGFNSAAYIHTLTEAMRHAYIDRNTYLGDPAFIKNPLERLLSKSYAESIRKEIQPNKATPSKLVQPGIGPHEKPETTHYSVVDKDGNAVSTTYTINGRFGAVVIAPGTGFFLNDEMDDFTTKIGAKNMYGLVQGATNSIAPGKRPLSSMSPTLVTKDNKIFLVLGSPGGSRIISITLQAALNIIDFDMPPQEAVNSPRIHHQWLPDEVYYEQRGLSKDTLNLLEKMGYKMVEQTPWGATELIMIGLPGAAGVSPVNSSGNDSAVSGKVREGYIYGANDVRRPAGAAIGY

SEQ ID NO: 5700 - protein, 282 aa, Xenorhabdus sp.
MNTLERLQNSLDVLSKSEKKVAQVILDSPNTAIHSSIATLAKMANVSEPTVNRFCRRLNTKGFPDFKLHLAQSLANGTPYVNRNVEESDSVTSYTNKIFESVMANLETVKSNLDITTINRAVDLLTQARKLSFFGLGASAAVAHDAMNKFFRFNIPVSYFDDVVMQRMSCINSTEGDVVVLISHTGRTKNLVELARLARENDATVIAITSTDSLLAREATLSILLDVPEDTDIYMPMVSRIAQLTIIDVLATGFTLRRGSKFRDNLKKVKEALRNSRFDKHD

SEQ ID NO: 5701 - protein, 480 aa, Xenorhabdus sp.
MSRRLRRTKIVTTLGPATDRDNNLEKVINAGANVVRLNFSHGTAEDHILRANKVREIAARLGCHVAILGDLQGPKIRISTFKEGKIFLNIGDKFLLDANLGKGEGDKEKVGIDYKGLPSDVTTGNILLLDDGRVQLKVLDVQGMKVFTEVTVGGPLSNNKGINKQGGGLSAEALTEKDKEDIITAAKIGVDYLAVSFPRSGEDLNYARRLARDAGCETQIVAKVERAEAVSSDEIIDEIILASDVVMVARGDLGVEIGDPELVGVQKKLIRRARQLNRVVITATQMMESMITNPMPTRAEVMDVANAVLDGTDAVMLSAETAAGQYPAETVAAMAQVCLGAEKMPGINASKHRMDITFDSIEEAISMSAMYAANHLKGVKAIIAMTESGRTARMMSRISSGLPIFSMSRHESTLNRAGLYRGVTPVYCSSHIDGIAAASEAISRLRDRGYLASGDLVLVTQGDQMGTIGSTNTCRVLEVE

SEQ ID NO: 5702 - protein, 114 aa, Xenorhabdus sp.
VGEILRDLCKYKGVEIIEGHLMPDHVHMLVSIPPKLSVSSFMGYLKGKSSLMIFDRHANLKYKFGNRKFWAEGFYVSTVGLNEATIQKYIREQEKSDLISDKLSSKEHVDPFKG

SEQ ID NO: 5703 - protein, 491 aa, Xenorhabdus sp.
MAVTSTAQACDLVIFGAKGDLARRKLMPSLYQLEKAGYIHPDTRIIGVGRADWDKKAYIKLVEEALTTFMSEKLDPELWKKLSSRLEFCNLDVNETEHFSRLAKILNQDKLPAIHYFAMPPNTFGSVCHGLGVAGLNKEPNRVVMEKPLGTDLASSRAINDEVAKYFSENQIYRIDHYLGKETVLNLLALRFANSLFVNNWDHRTIDHVQITVAEEVGIEGRWGYFDQAGQMRDMIQNHLLQILTMIAMSPPSDLSADRIRDEKVKVLRSLRRIDHTNVREKTVRGQYTAGFVHGKKVPGYLEEEGANKASKTESFVSVRVDIDDWRWSGVPFYLRTGKRLPAKCSEVVVYFKEPALNLFAGSYQQLPQNKLTIRLQPDEGIDIEVLNKAPGLEHKHRLQTTKLDLSFSETFNQTHLADAYERLLLEAMRGIQALFVRRDEVEEAWKWVDSIMEAWAADNEPPKPYQAGTWGPVASIAMITRDGRSWNEFE

SEQ ID NO: 5704 - protein, 107 aa, Xenorhabdus sp.
VIRRGEGTKVTAEQANYQATLLATCPPGARRDIYLLMTQPGADRLSDPHPAGSVEHIIVTKGRALVGLTEAPEELSEGDYICYPADQEHIFKALEPDTQAILVAEQN

SEQ ID NO: 5705 - protein, 500 aa, Xenorhabdus sp.
HDGSACLMKNGKIIVGIEKERLTKIKHDGFNDNDAIRYCLNAAGITFKDVDLFVEKYTVNEKHKPDDIIKRRGRIIPEYLPVVRISHHIAHAYSAVGTSPFSESAVIVCDGMGGSIDSCLDHDISLVPSEIGKLSKSDYIDYFEKESYYKFFNNNVVTVFKDYSKFNLNDLDKYKIAPYDIEHSIGGLYGGASKFVFGKDFNEGKLMGLAPYGKSGRFPEELFLIEDARVKINYDLIEDLGIKNTNIKDDFQYCADLAKWVQEQTEKALFYILNSYHKMYASDNLCYAGGLALNAVANGKIIKNTPFKNVYIQPAAGDNGLAIGACYYGWMKVLNKEKILFNGNPYFGIKYDESKSSLRKYLNDNYAITKPDNLDEVVAKHISKGKVVGCFRNGSEFGPRALGNRSILADPRRKEMLDYINIEIKNREEFRPFAPSILKDRYLDFFRPGNEDSDYMIKVSQVIPEKSEQISAVVHVDGSARVQTVTRELNRDYYNLINSF

SEQ ID NO: 5706 - protein, 113 aa, Xenorhabdus sp.
LTNITLAPSKLLTISHSFNAYPNGNIYIGKIDTDPARPENQIQVYLEREDGTHVPVSQPLIINPAGYPVYNGQISKFVTAQDHSMAVHDSYGAQQFYDPNVLKYDPEQFSEKL

SEQ ID NO: 5707 - protein, 196 aa, Xenorhabdus sp.
MKNIKVRKNVIIPIDNTSKETRFITFSGLEDEHFAISIGELKTESPVLIRIHSECLTGDVFGSHRCDCGSQLQEAIKKIDDKGNGLIIYLRQEGRGIGLYPKIDAYDLQSKGIDTFTANEMLGYEDDLRKFDDAVLMLKALNVNTVDLITNNPEKIDCLLSNNIKVNRIIPTGVYVTKENKKYLESKVKKKFHTIN

SEQ ID NO: 5708 - protein, 189 aa, Xenorhabdus sp.
DVLTSADLIVDEYLKKSISNIFPSDTIFSEESSVYGIADTSEYTWIIDPIDGTHSFSTGVFGWCISIAAFKKGSILFGLIYDPIRKECFSAYHGQGAFLNSTRLLAKSHQFLEHDPVPYLAFGTSYRDDKRKISKVLTTLLESGYLPYRNGSAALCMSYVAANRLLAFFELNLYQWDVAAGYIILKEAG

SEQ ID NO: 5709 - protein, 403 aa, Xenorhabdus sp.
FIVSSAFFLEVLDATIFTPVLIDISNEFKTPIEITTISLASFVFSLAIFTPLSINLFSKTGAKKKFIIGMMIFFVASFLCSISNNIYFLSISRMLQGFGSALVVPIGRTLVLNKTKKENIPVVMTYLVWPALFAPVIAPVIGGYLTQYYNWRYIFYFVLLCSFFVLVLSLKWLSNNEVILSSNDKIDFLSYLSWFCLVFSVFYFFSLATTGYMTLSLFSIVILFLSFYLTLIKKNKLFDSSLLSNNFFRINIIYGSFFRVAIYCFPVFLVLSLMTTFDYTPLMSSVCIIFIFIGNILAKPVAANILTKIKNIKLYFFTSSSFCFFSILCFINKGVYSDSTCVYFLCFIHGVARSFQFLGYSSIAFYGLKKEILYKANILNNSVMQLNAMLGQSIPAMLFALID

SEQ ID NO: 5710 - protein, 138 aa, Xenorhabdus sp.
FFMRMALHESIKALPRCLPNPPVGAIITYNNVIVGKGFTQEYGGKHAEIIAIENVENSILLHECNIYITLEPCCYYGKTPPCVDNIINNRFKKVFIGMIDCHSKNNGKSIDMLRLKSIYTCVGLLKEEIEVFLVKYLW

SEQ ID NO: 5711 - protein, 492 aa, Xenorhabdus sp.
SPHYKSTLLGINEYLTGNEKNFYLYSGAIKILMSLFFNLPHLCGIGGDAIIINKHKGKISVINGTGKTGKYQNRASYEDKGFNSVPRRGVYSTMVYGAPYAFDRLVKEGDIDLVSIIGSLIKDDFHKGFIKLPNFKVLFDKAKLEFSQATKMTEWEGLFCGEQQISQSFINTMKRISQAGFIDCYTGELGDSVYNQLSNYDVNLYDESDFLNYRPNVSEIKKIKFMDSEVFCHGSNSPWKELFLFLKIYEIFAEKNKKIDYEKICKLTPYIEDTADIIKYNSENYADEIKKFAELLFDMAEKDFLDEKDIRHKQSHTIFLAGVNKYGDLIGITNSIFTPLGALFEIENTGILLSNRCYAFNETSSKETFKSNSPVKHTNNCIIVESDDMNFVIGTAGGPVQSQTLSFVINKIISEKFEPYNAVIEPRFANIGYHAKTKKITYLTESKDAGGLFISTEGHSNKLGVVQLAGINKKNGLLFSVSDPRGQGVALG

SEQ ID NO: 5712 - protein, 429 aa, Xenorhabdus sp.
IIKLALPIMAQSILFTSMSIIDTIMVGYIGTEELAGMGLATSIMLVFLSVVYSSSNSVSVIVAQNKHFKNTLKLIVTNGLVLSLTLSFFIFSIIKLFNEDIILLFWGEEDYAYKAIDYLNIISYTILASAIIQVYIGLLNALGDTFLTFLISASGVVSNIFFSYFLVFGIADMDGYGIIGAALGSVLSKLVEIGIILFFLLKKYNGLYLDFDKFNYKCKSFRELLRIGGAQAINALLWAASINLYTLIIAFQGKELVASSAVISSITNLAHIAYWGIAIAAGIVISEASGKKEYERATTISRLCIILSLVFALLLAALLYLLNGFILSFYPELSQRSIDFVDAAYSIVLFTIVIRSLSTVNIVGTLRSGGDNRFIITIDVVAAWFFGIPLCYLILFHTDLPLFLAFAAPMVEDMVKAVLSTFRVIGKKW

SEQ ID NO: 5713 - protein, 106 aa, Xenorhabdus sp.
VDGCEIKSELLQIKSRNRATVLELAENGGAEAVARFLFGELYTGNFEDFYRSFLQREVNSLLSQDELFQRNEVFSQCQNESFQREEILIRKRFKKKCPLFLKLDCP

SEQ ID NO: 5714 - protein, 62 aa, Xenorhabdus sp.
MRADLFQQLLSGVKEMVAIENGELQPNSSRVHRHVVSDADFELTKNRFKVAKNLKKSDREIR

SEQ ID NO: 5715 - protein, 439 aa, Xenorhabdus sp.
MSNKYQRAIDHLAKTSDPDRIIGAIQAVEDLFSASWLEKQDGHRLQILWDRRDTISTSELYSLGKSILKLSENNRQWLETSAREIKKNINNSHGLLTEIILIGSLSTEFGKIAPCTKSHPLYDYTIDFNTGYQYKVSVKNFDISIHEKCFNKQCEHIRTTFKNFLKRKKISGRLNIILEHDFLTEYQAKIICFFIVFKIDKYGIYTLFDGRISINFNPLNEYENKGLVYPSDIVFIMARQHYNEQRNIKDKIKKAHDQLSKDPSDEKSIKKLIIRLGPTTNIDLMHKYMQELAEDWECCGFDMYILLQPAVVSDVEKNTTMISTTVYHGTKSFYLAPESSNIRQKFENLGLFKFEVGVGAINYERVPLVIMANGSLKNIDLSSFYTYQRGDVYLKAERVGDDYVGNLSNVTSGVLLHSVVDNIVLSAVCFSTDDKLLIV

SEQ ID NO: 5716 - protein, 285 aa, Xenorhabdus sp.
SFVLNVAPTGMIPTKKINKNVPISVNEIVDDVLQAAEYGASMAHIHARDQVTEKPIVSDEAYGRIISEIRKYNKDIIICVSLSGRNVSDVNQRALPLELEGDLKPDMGSLTLSSLNFINQASVNSPETIQFLATEMKKKLISPEIEVFDTGMANYISFLTKKGLLPNNIYANVLLGNIAGAQSSFSNISAILSNIPNNVICSFAGLGSYQSQATSLALASGYGVRIGLEDNIWYDKKKTILASNKELIKRIIRLADEFEITPAKPVDVRKKLGLALGHGHYGLLQ

SEQ ID NO: 5717 - protein, 195 aa, Xenorhabdus sp.
MVDFARKSHDDEKINFVVDDFLNYENHEMKLYDVIVCAACLHWFIPREQEVLDKIFNYLKPNGYLFLSCAFDFDFFCGEKDIQGKVLEVVRNKYSPVSPSVVFDDYRFDNEKFKNFTKYFNILKSYRIEESIDFSNYDDFKDWHLGSGSVIYQQFSKLDQESAVNDFYQILYDKYLSNEHKVSYSTGLFLLQKRG

SEQ ID NO: 5718 - protein, 110 aa, Xenorhabdus sp.
IDDPRSDINKKHELMDVIFLAFSAVLCGASGWKSIQEFGELQIEWLKQYTSFTHGIPRRHCVANIIKMIDQDALVEAFYGWINQRRVTGGKSLIAIDGKTLTGTCKGTLV

SEQ ID NO: 5719 - protein, 360 aa, Xenorhabdus sp.
VNIAIAGIGNCCSSLYQGINYHLDSDPIINDLGISIKDINVKAAYDVDCRKVGLPISKAIFTKPNCARIFCTDLPEGPIVEKIEVFDGVSPYMSNQPEDRGFRVSSTQKPIDLISSLKKNEIDILINYLPVGSQKATEYLAECCLESGVSLLNCIPVFIASDPEWDRKFYDKGIPIIGDDMKSHLGASILSQVYQELALSRNLTVDYHQQINIGGNTDFNNMMVQERLTSKKISKENVIRSQNEIAGVEVHEDSIFAGPSTYIPYLKDNKVAHIRLELTGFGGSKVEIDTKLSVQDSENSAGVVIDAIRYLKIARDMGLKGALKGPSAWTQKTPPVQLKIEDAISECQKLIAFEVPKYMF

SEQ ID NO: 5720 - protein, 285 aa, Xenorhabdus sp.
MTLSIIIPSYNKKESLMSLLALLNKQSADFSDFEVIVVDDGSSDETCLAVTKLDYNYKIKYIYVPDEGFRVARARNIGAKNAQGELLAFVDADVLLPSYFVQSVIKFHSYNPQSVSIGYVYGLYSENKWDLKVDLDDVDSTIRKMKEQGIGKDIRQNSYEKFNYKLCSMPAPWVFLWGTIFSVEKELFEKVGCFDEHFTSWGGEDIDLGFRLHKANYKFHLFEGIEGVHLSHPENDEINYKTNLENKKYISEKYNDEMTDLLIKEENIFKLNDLIILKNAEEKDV

SEQ ID NO: 5721 - protein, 280 aa, Xenorhabdus sp.
MVRIIILKHFHNLSDEKMEYQLLDRMSWQRFCRLTDVINIPDRNTIWCFEKRIGQEGARALFEEAKHQLSAQGFIPKGGQIIDATLIPVPKQPNKKEENEQIRQGKTPDNWTVNKRCQKDTEATWTKKHGKRYFGYKLTLNVDTKYKVIRHIATGTAAVHDSQFFEAVLDRSNTRRDIYADKGYASQKRERVLKEQGYRVHIQRKAARNKPLSHCQKGRNKKIAKTRARVEHIFGSLSQMGEKIIRTIGQLRANFAMTMKATCYDLQRLVYFGKSGIHAF

SEQ ID NO: 5722 - protein, 352 aa, Xenorhabdus sp.
VMSKKEFGVFLPIAKGGWIISKNTPPLDASYKQNREAAIFADQIGLDFIMSMGKWRGFGGETDHWGSSLESVTMMAGIAEVTHRAKLIATIHAGLHNPAVTAKMIATLDHISQGRAGLNIVSGSFRDEFEQMGEWDSKLDHDQRYAMTEEWTLLIKRLWREKQVDHQGTYFNLKQCVSEPKPLSRPRPYLVCAGQSECGLRFSVRHTDVCFIGGKDEAETRKISLTAKRIASEYNTTTKTFCMCTIICAENDAYADTLAQFYQQGLDVGAVRNMMHSFGVDTDGKNNAMVERSQNAFMTHTAIGSPETCYRQLSELLRTCELDGVMLIFPEYIKGLRIFADQILPKLKAEFS

SEQ ID NO: 5723 - protein, 380 aa, Xenorhabdus sp.
MINELGWSWTDAGLGFTLLGLTCGLSSFLPTVFIRRIGVRFTLFIGLLIFLAGFYNFYHTHTIASYFIGTALIGIGFTFLATVPGTYVISRLYEKQSLAFGFYFTIGGLGGVIGPWIYFLATRVWGTWRMHWMISAIVLTIFVILTILTLQEGDREIAHAKTVNQKNNSENSSNIYRTQQFWTARQALRTWQFYVIAATYTAFLWCGITVNSFAVAHIIENGFSEAIAAGLLSSMAFINAFSRLAGGAAGEWLEPKKLLLGSLTVIILGLIALSIASSWPFLIAFTLFVGMGYGMTFLASSVLLANYFGRNPYLELFSIMNLISTLACLAPFFAGAIKDYSGSFTWAFLILAFPVFIVLVVTLMMKPPSQKMRDHSVETE

SEQ ID NO: 5724 - protein, 157 aa, Xenorhabdus sp.
MTGYDFSYGPLKDVLFAQWVAKTKNTKYDYFPGISLDWQVAGFSWLRTIFYLENNAKGNWDDQRIHIDYGIPFSNQLGDFRIVGTFDYTLGKRDNPEMFDFKPELHYDLGKQLGYQSGHLWTGFVVNPIKNKYKIKDTPYFRTNQLSYGVFIRYSFF

SEQ ID NO: 5725 - protein, 185 aa, Xenorhabdus sp.
NASCTTNCLAPLAKVINDKFGIVEGLMTTVHATTATQKTVDGPSAKDWRGGRGAAQNIIPSSTGAAKAVGKVIPELNGKLTGMSFRVPTPNVSVVDLTARLEKPATYKEICEAIKEAAEGELKGILGYTEDDVVSTDFNGEKLTSVFDAKAGIALNDNFVKLVSWYDNETSYSNKVLDLVAHISK

SEQ ID NO: 5726 - protein, 183 aa, Xenorhabdus sp.
MTFNVTEALADFTRRYVELWQEETGLPPASSELYGVPSPCIERTGDEVVHWLPKPFTPADKLSKVENALDICLQNSIHDYYVTQLAGDMSASFDGLSFSLIQVWSEDDFVRLQENLIGHLVTQKRLKLSPTVFIGTTDSDMGLISVCNLTGQVILEQFGSKERTVLSADLAAFLSAATPVISS

SEQ ID NO: 5727 - protein, 43 aa, Xenorhabdus sp.
MGLISVCNLTGQVILEQFGSKERTVLSADLAAFLSAATPVISS

SEQ ID NO: 5728 - protein, 55 aa, Xenorhabdus sp.
MSALIEQKASLPTSFAIAPYFEEVYKEETERYLPLLKHLRELDSLFTSDDLAGNG

SEQ ID NO: 5729 - protein, 257 aa, Xenorhabdus sp.
MLDIIYQDEHIVAVNKPAGWLVHRSWLARHETVFVMQTLRDQIGQHVFPVHRLDRPTSGVLLMGLSSDVARTLSRQFEHQQVQKTYHAVVRGYVEGEEIIDYALMEELDKIADKFADTDREAQSAITHYRALAKIECPVEIGRYPTSRFSLLELKPKTGRKHQLRRHMSHIRHPIIGDTTHGDLRQNRGVAKYYQTGRLMLHASHLQLRHPVTGQELLLTARWDSSWQHLLEQFGWQGLVPELECSHPVACELQPTE

SEQ ID NO: 5730 - protein, 148 aa, Xenorhabdus sp.
MAKIGIFVGTVYGNALAVAEEAQQILEQQGHEAEVFEEATLEQWQEYLQQVVLVVTSTTGQGDLPDNIQPLYAELNDQLGYQPDLRYGLIALGDSSYDTFCGGGHIFDALLQEQGAKRIGEILQIDALEVVEPEVFAQGWVEEWGNLL

SEQ ID NO: 5731 - protein, 455 aa, Xenorhabdus sp.
QMKKLLSLFIAINLVGFSTSGHAEDLLQIYKQAKETNPELLKALADRNSVFEGIDLARSPLLPQLSLTAGAKYLKSFRNSEQENHGINAGLSLKQSIFDMSSWSKLNQAEKKAGIADISYQAAQQKLILDTANAYFDVLSKIDALTYSEAQKSSLYRQLDQTTQRFNVGLAAITDVQNARAQYDSILAQEVYDRNELDNSLEKLRLITGVYYPQLASLNIDHFKTSKPKPAEDLLKEAETRNLNLLSARLMQDLKREQIKDAQTGYMPTLGLSANTGVENEHTRHSSASGNQYGGNHSVSVSFSMPLYSGGATSSQVEQAKYDFLSSSQDLENTYRKVIQDVRSSSNDIAASISSIEANKQAVLSAESSLHSMEAGYQVGTRTIVDVLESTTKLYQAKKNLSQARYKYLISLLVNQQSRGTLNEDDLAALNNILGTQVSTSASNIIKEMKTPSIR

SEQ ID NO: 5732 - protein, 226 aa, Xenorhabdus sp.
MTMKRTKEINRDSFRKAWKQYRLAPVALAVSAVFMLSACEQNDETVSLYTNADECSKANPSQSEQCTIAYNNALKEAEKTAPKYATREDCVAEFGEQQCTQAPAQAGVGTQAQAQSSSGSFWMPLMAGYMMGHLMGNRSAPSQPLFSSKSASSPANGKFVDATGKSYGPATAGGRSMSVPKTAMAPKPATTTTITRGGFGDSVAKQSSMQRSSAGSSSSSSRSMGG

SEQ ID NO: 5733 - protein, 386 aa, Xenorhabdus sp.
MKRISITERPDWREKATEYGFNFHTMYDQPYWSEEAYYQFTLRQIEEIEDATAELHQMCLQVVEKVVNSEELLTKFQIPKHCWEFVRSSWVTSQPSLYSRLDFAYDGQNPPKLLENNADTPTSLYESAFFQWIWLEDQVNAGHLPSNADQFNSLQEKLIERFAQLREKHGFGLLHMACCQDSEEDRGTIQYLQDCASEAGIPTEFLFIEDIGLGEKGQFTDLQDQVIGNLFKLYPWEFMLREIFSTKLADAGVRWLEPAWKSIISNKALLPMLWKMFPNHPNLLPAYFADERPADMDRYVIKPLFSREGANIRIIENGREIASADGPYGEEGMIVQQFHALPKFGDNHTLVGSWLVNDQAAGICIREDRELITQDLSRFYPHIILD

SEQ ID NO: 5734 - protein, 99 aa, Xenorhabdus sp.
MLDPKKIEQIARQIHNAMPKGVKEFGDDIEKKLRTVLQSQLSKLDLVNREEFDVQTQVLLRTREKLISMEQRLNELEARFETPKTAINAEESHGEKKAD

SEQ ID NO: 5735 - protein, 187 aa, Xenorhabdus sp.
VHAEEKRYVSDELSAYIRSGPSNQNRITGSLNAGSEVILVNPKSENGYSQIKDSKGRTSWILSSELSAIPSVHERIPAMEQKIKTLTEQLANIDKSWNERTAEMQDKVAASDRIINDLKAENTKLNNKLTVAEKKVEIANLQLDDKQREIILQWFMYGGAVAGIGLLLGLVLPHIIPRRKRKDRWMS

SEQ ID NO: 5736 - protein, 64 aa, Xenorhabdus sp.
VKVYLVGGAVRDQLLNLPVTERDWVVVGGSPEELLSQGYQQVGKEIPRFLHPQTHEEYALAPSE

SEQ ID NO: 5737 - protein, 43 aa, Xenorhabdus sp.
METLMTKMEEQGVGFTATPAPGDLTLGGVLAIGGHGTSVKAMN

SEQ ID NO: 5738 - protein, 128 aa, Xenorhabdus sp.
MYDNLKSLGITHPEDIDRYSLRQEANNDILKIYFRKDRGEFFAKSVKFKYPRQLKTVSDDNAGQGYKEVKEINTNLRYVLEELDQICKREQAEVDLKHKILDDLRHLEHVVANKIAEIEADLEKLTRK

SEQ ID NO: 5739 - protein, 339 aa, Xenorhabdus sp.
VVDSLTYAGNLESLAPVADHPRYAFEQADICHRDALERIFQQYQPDAVMHLAAESHVDRSIDGPAAFIETNIIGTYTLLEAARAFWQQLDQEKQATFRFHHISTDEVYGDLHGEEGFFTETTPYAPSSPYSASKASSDHLVRAWRRTYGLPTVITNCSNNYGPYHFPEKLIPLVILNALAGKPLPVYGEGKQIRDWLYVEDHARALHLVVTQAIPGETYNIGGHNERRNIDVVETICELLEEFKPEKPAGVAHYRELITYVTDRPGHDMRYAIDAAKIERELGWKPQETFESGIRKTVQWYLANENWWCRVQDGSYAGERLGLSEHDGQFDQINKPIQL

SEQ ID NO: 5740 - protein, 420 aa, Xenorhabdus sp.
MSFETISVIGLGYIGLPTAAAFASCQKTVIGVDVNQHAVETINRGKIHIVEPDLDQVVKTAVEGGYLRAVTSPQPADAFLIAVPTPFKGDHEPDMAYVYSAAESIAPVLKKGDLIILESTSPVGATEQMAERLAEARPDLTFPQQAGENSDIDIAYCPERVLPGQVMVELVKNDRVVGGMTPKSSSRASELYKIFLEGECVVTNARTAEMCKLTENSFRDVNIAFANELSLICAEQEINVWELIRLANRHPRVNILQPGPGVGGHCIAVDPWFIVSQNPTQSRLIRTARLVNDDKPLWVVDQVKAAVADCLAESDKRASEIKIACFGLAFKANIDDLRESPAVHITKMIAQWHAGSTLVVEPNIHELPHSLEGVVELVSLQQALEEADVVLMLVDHSQFKAINGSQIKQKWVVDSKGVWR

SEQ ID NO: 5741 - protein, 376 aa, Xenorhabdus sp.
VKVLTVFGTRPEAIKMAPLVHALAEDSDFEAKVCVTAQHREMLDQVLNLFGIKPDFDLNIMKKGQDLTDITCRILESIKPVLNEFKPDVVLVHGDTTTTMATSLAAFYQRIPVGHVEAGLRTGDLYSPWPEEANRKIAGHLATYHFAPTENSRSNLLQESIADKAVFVTGNTVIDALLWVRDRIMHDDILRGQLAELYPFIDPAKKMILVTGHRRENFGGGFERICEALAQIARMHPDVQVVYPVHLNPNVCEPVKRILHGIDNIILISPQDYLPFVYLMDHAYLILTDSGGIQEEAPSLGKPVLVMRNTTERPEAADAGTVRLVGTKTQTIVDEVTRLLTDNSAYQQMSRAHNPYGDGKACQKILEILKKNQVTL

SEQ ID NO: 5742 - protein, 351 aa, Xenorhabdus sp.
VENSETKSNQDQTVTEHELDIRALCCALWRGKIWIIALAIIFAAVALAASYLMQQKWSATAIVDLPTTNNLGSYYSQQQFLRNLDTHINASPEAQLPTIPDGAYKEFMIQAEAYDTRREFWLHSNYYKQRHDGKSKADAVLLEELINNIQVTRRGEKNVQNESIKLTAETAADANRLLREYIAFANQRASTHLNDEIKGAWATRTQSMKALVKRQELVAKAMYNRELNVLQQSLKVAEKQGIQRNQTNTPIGELPESKMFMLGVPLLQAQLETLEATGPNYSIDYDQNIAMLSTLSVGPTLQNTFQTYRYLRTPEEPVNRDSPRRVFMMVLWGGVGLLIGAGVALARRSRT

SEQ ID NO: 5743 - protein, 362 aa, Xenorhabdus sp.
VNIPSMSVEVFCIFIFSFIFLFMARKVAKKVGLVDKPNYRKRHHGLIPLVGGISVFVSVCFAFVITKEFIPHKWLYLFCAGILVFIGALDDRFDISVKIRATIQALVGISMMYFADLRLESLGNTFGPWEMTLGPFSYVVTLFAVWAAINAFNMVDGIDGLLGGLSCVSFGALGILLYESGNTALAFWCFAFIAGILPYIFLNLGLLGKRFKVFMGDAGSTLIGFTIIWLLTEATQGVNRSINPVTALWIIAIPLMDMVAIMYRRLRKGMSPFSPDRQHIHHLIMRAGFTSRQAFVLITMASALLAGIGIIGERLDFVPQWVMLALFLLAFMLYGYCIKRAWRVARFIKRCKRRMRRVASHH

SEQ ID NO: 5744 - protein, 113 aa, Xenorhabdus sp.
MSEKIVSAGVIHLADSDFNEDKLQSEGIVLVDFWAEWCGPCKMVAPILDEIAAEYAGKLTVAKLNVDDHTETAPKFGIRGIPTLILFKDGEKVAVKVGALSKTQLKEFLEPYL

SEQ ID NO: 5745 - protein, 676 aa, Xenorhabdus sp.
MRLNPSQQQAVEFVTGPCLVLAGAGSGKTRVITNKIAHLIRACGYQARHIAAVTFTNKAAREMKERVAQTLGRKETRGLMISTFHTLGLEIMKREYKALGMKSNFSLFDDQDQMALLKDLTADLLEEDKDLLQKLISSISGWKNDLMSPEQVIRRARSEQEHHFAECYRRYDLHLNSCNVLDFDDLITKPTLLLMRDEEVRERWQNRIRYLLVDEYQDTNTSQYQLVKLLVGNRARFTVVGDDDQSIYSWRGARPQNLILLKEDFPQLKVIKLEQNYRSSGRILKSANILIANNPHVFEKKLFSELGYGDPLRVIEANNEDHEAERVVGELIAHHFINKTDYKDYAILYRGNHQSRIFEKMLMQSRIPYRISGGTSFFSRPEIKDLLSYLRVLTNPDDDSAFLRVVNTPRREIGAVTVQKLGEWAKQRNKSLYHASFDLGLEQNLSGRGLAALQRFTHWMNEISHQAERDPLLAVRDLLHGMDYESWLYETSPSPKAAEMRMKNVNQLFTWMSEMFEGDDLNEPMTLSQVVARFTLRDMLERGEESEESDQVQLMTLHASKGLEFPYVFMVGMEEGLLPHQSSIDEDNIDEERRLAYVGITRAQRELFLTLSKERRQYGELIRPEPSRFLLELPQDDLDWPQGKKVVSVEERMKRGQSRLADIKSRFGLGQKTGGN

SEQ ID NO: 5746 - protein, 492 aa, Xenorhabdus sp.
MANYFDTLNLRQQLAQLGKCRFMAREEFADEAGYLKGKKVVIVGCGAQGLNQGLNMRDSGLDIAYALRKEAIEEKRASWRKATENGFRVGTYEELIPQADLVINLTPDKQHSAVVQAVQPLMKEGAALGYSHGFNIVEVGEQVRKDITVVMVAPKCPGTEVREEYKRGFGVPTLLAVHPENDAKGEGMAIAKAWAAATGGHRAGVLESSFVAEVKSDLMGEQTILCGMLQAGSLLCYDKLVADGAEPGYAGKLIQFGWETITEALKQGGITLMMDRLSNPAKLRAYALSEQLKSILTPLFQKHMDDIISGQFSSGMMADWANDDKDLLNWRAETGQTPFENYPDYSGHISEQEYFDHGVLMIAMVKAGVELAFETMVDSGIIEESAYYESLHELPLIANTIARKRLYEMNVVISDTAEYGNYLFSYVAVPLLQKEFMSSLQAGDLGKAVADNGIDNAQLRDVNDAIRNHPIETIGRTLRGYMTDMKRIAVGG

SEQ ID NO: 5747 - protein, 515 aa, Xenorhabdus sp.
VVVYPLNPEPKGAEYLKAALSAPVYDVAQVTPLQEMKKISARLNNTILVKREDRQLVHSFKLRGAYAMIASLTEEQKVRGVITASAGNHAQGVALSASKVGIRATIVMPIATADIKVDAVRSLGGEVLLHGANFDEAKAKAIEMAKEHRYTFVPPFDHPAVIAGQATLAMELLQQDVHLDRIFVPVGGGGLIAGVAVLIKQLVPEMKIIGVEAEDSACLKAALEAGHPVDLPRVGLFAEGVAVKRIGDETFRLCQKYVDDVITVDSDAICAAVKDIFEDVRAIAEPSGALALAGLKKYVQQHQIKGERLAHILSGANVNFHGLRYVSERCELGEQREALLAVTIPEQKGSFLTFCQMLGSRFVTEFSYRYSDSAEPNKACVFVGIRLNRGNTERIEIIEGLKAAGYQVADLTDDEMAKLHVRYMIGGRPSKPLQERLFSFAFPESPGALLKFLQTLGAHWNITLFHYRSHGTDYGRVLTAFELSEEELRFDRHLGELGYEYHDETNNPSFNLLLR

SEQ ID NO: 5748 - protein, 616 aa, Xenorhabdus sp.
MPKYRSATTTHGRNMAGARALWRATGMTDEDFGKPIIAVVNSFTQFVPGHVHLRDLGKLVAEQIEASGGVAKEFNTIAVDDGIAMGHGGMLYSLPSRELIADSVEYMVNAHCADAMVCISNCDKITPGMLMASLRLNIPVIFVSGGPMEAGKTRLSDQIIKLDLVDAMIQGANPNISDEQSDQIERSACPTCGSCSGMFTANSMNCLTEALGLSQPGNGSLLATHADRKTLFLNAGKRIVELTKRYYEQNDDSALPRNIATKAAFENAMTLDIAMGGSTNTVLHLLAAAQEGEVDFTMTDIDRLSRQVPHLCKVAPSTQKYHMEDVHRAGGVIGILGELDRAGLLHRYVKNILGLDLPQTLAQYDVMQTADEAIKSMYAAGPAGIRTTQAFSQNCRWPSLDTDRKEGCIRELSYAYSQDGGLAVLSGNIAVDGCIVKTAGVDESILTFSGPAKVYESQEDAVDAILGGKVVAGDVVVIRYEGPKGGPGMQEMLYPTTYLKSMGLGKSCALITDGRFSGGTSGLSIGHVSPEAANGGLIGLVHDGDIIDIDIPNRKIQLDVCEKELAERVQKELSRGDKAWTPKFRERQVSFALRAYASLATSADKGAVRDKTKLGG

SEQ ID NO: 5749 - protein, 307 aa, Xenorhabdus sp.
TKQADYIWFNGEMVPWADAKVHVMSHALHYGTSVFEGIRCYNSHKGPVVFRHREHMQRLRDSAKIYRMPVSQSIDELMEACRATLRKNKLVSAYIRPLVFIGDVGMGVNPPEGYQTDVIIAAFPWGAYLGEEALEQGIDAMVSSWNRIAANTIPTAAKAGGNYLSSLLVGSEARRHGYQEGIALDVHGYISEGAGENLFEVKNGILFTPPFSSSALPGITRDAIIRLAQDLGLEVREQTLSRESLYLADEVFMTGTAAEITPVRSVDGIQVGSGRCGPVTKKIQNAFFGLFDGTAEDKWGWLDPVNP

SEQ ID NO: 5750 - protein, 548 aa, Xenorhabdus sp.
MNGAQWVVQALRTQGVEKVFGYPGGAIMPVYDALYDGGIEHLLCRHEQGAVMAAIGYARASDKPGVCIATSGPGATNLITGLADALLDSVPVVAITGQVSSEVIGTDAFQEIDMLGLSLACTKHSFLVESLEKLPQIMAEAFSIAMEGRPGPVLIDLPKDIQLKQGDFTPYLSPAVTPSPLPENALKQARNMMVYSQKPVLYVGGGVGIAGAVPELRRLVEETGIPVVSTLKGLGAADAQHECYLGMLGMHGTKTANLAVQSCDLLIAVGARFDDRVTGKLDTFAPHAKVIHIDIDPAELNKLRQAHISLKGNLKTLLPYLQQPLSIEAWQQEVKQLKEIHAWRYDYQGEKIYAPALLKLISDRKPPNTVITTDVGQHQMWTAQHMTFDRPENFITSSGLGTMGFGIPAAIGAQMVRPDDMVICISGDGSFMMNVQELGTIKRKKLPIKMVLLDNQRLGMVKQWQELFFDRRYSETILTDNPDFITLAKAFDIPGQHITEKSQIDAALDALFNSEGPYLLHVSIDEFENVWPLVPPGASNANMLEKLL

SEQ ID NO: 5751 - protein, 121 aa, Xenorhabdus sp.
MTVELGVCQMAESFITTNRFFDNKHYPRGFSRHGDFTIKEAQLLERHGNAFNELDLGKREPQTEEEKLFVAVCRGERAPVTIAEKVWFKYLEKIRRPKRFHTLSGGKPQLDPAEDFTDSDD

SEQ ID NO: 5752 - protein, 467 aa, Xenorhabdus sp.
MQYTHFDAIVIGSGPGGEGAAMGLAKQRKNVAVIERYNNIGGGCTHWGTIPSKALRHAVSRIIEFNQNPLYSDNSRILRSSFSEILRHAEVVINQQTKMRQGFYERNRCKMFAGEATFIDEHHVSVRYADDSVDILSADKIIIATGSRPYCPPDVDFTHSRIYNSDTILELDHEPRHVIIYGAGVIGCEYASIFRGLGVKVDLINTRDHLLSFLDQEMSDALSYHFWNSGIVIRHNEEYEKIEGLEDGVIIHLKSGKKVKADCLLYANGRTGNTDKLGMENVGLETDSRGLLKVNRVYQTSNENIYAVGDVIGYPSLASAAYNQGHIAAKAIMTGSENAEKYLVDDIPTGIYTIPEISSVGKTEQELTAMKVPYEVGRAQFKHLARAQIAGMNVGSIKILFHRETKQILGIHCFGERAAEIIHIGQAIMEQKGEGNNIEYFVNTTFNYPTMAEAYRVAALNGLNRLF

SEQ ID NO: 5753 - protein, 382 aa, Xenorhabdus sp.
KLPTFIELYRQLIAAPSISAVDEELDQSNESVISLLADWLKQIGFEIEVQPVPESRGKFNMLATLGSGSGGLLLCGHTDTVPFDAGRWTQDPFTLTERDGKLYGLGTADMKGFFAFIIDAIRDIDISKLSHPLYILATADEETSMAGARYFAANATIRPDFAIIGEPTSLQPIRAHKGHVAHAIRIEGKSGHSSDPARGVNAIDLMHESITQLMKLRHTLQERYHNPAFAIPYPTMNFGHIHGGDAANRICACCELHMDIRPLPGLILQDLNEALNESLEPVKQRWPGRLNVTELHPPVPGYECPTNHKLVSVIERLLGTKAETVNYCTEAPFIQQLCPTIVLGPGSIEQAHQPDEYIEVSMIEPTRKLIAQIVEHFCLGVG

SEQ ID NO: 5754 - protein, 295 aa, Xenorhabdus sp.
MSFFHANHQEALNQNLAELEGQIRVSFEFFPPQTAEMEQTLWKSIDRLSKLKPKFVSVTYGANSGERDRTHSIIKGIKDRTGLEAAPHLTCIDANREELCNIAHDYWSSGIRHIVALRGDLPNGSSKPEMYGADLVELLKKEADFDISVAAYPEVHPEAKSAQSDLINLKRKIDAGANRAITQFFFDVESYLRFRDRCVSTGIDVEIVPGILPVSNFRQLQRFATMTNVRIPSWMTRMFEGLDDDPESRSLVGASIAMDMVKILSREGVKDFHFYTLNRAELSYAICHTLGVRPC

SEQ ID NO: 5755 - protein, 105 aa, Xenorhabdus sp.
MAEWNGEYVSPYAEHGKKSEQVKKITVSIPLKVLKILTDERTRRQVNNLRHATNSELLCEAFLHAFTGQPLPDDDDLRKERHDEIPEAAKEIMRECGIDPDTWEY

SEQ ID NO: 5756 - protein, 613 aa, Xenorhabdus sp.
MTVVQVALPVPLARSFDYLLPEGLPVPASGIRVRVPFGKRSAIGVVSGITDNSEFAPEQLKSITELLDEATLFPDDLWQLLQWSSRYYHYPLGEVLFHAMPVLLRQGKPAEFSPLWQWQITETGQQVPPEQLKRSAKQQQALAKLRQQSVYRHQVSELEISESALQALKKKGFIDLHPVQPEAENWREHFQVIGERLKLNTEQATAVGAIRAEDKTFAPWLLAGITGSGKTEVYLSVLENILEQGKQALILVPEIGLTPQTIRRFRERFNAPVDVLHSALNDSERLSVWLRARRGENAIVIGTRSALFTPFAHLGVIIIDEEHDSSYKQQEGWRYHARDLAVFRAKKESIPIILGTATPALETLHNVQQGKYRQLTLTKRAGHAKPATQHLLDMKGLPLTVGLSQPLINRIREHLKADNQVILFLNRRGYSPALLCHECGWIAECQRCDHYYTLHQNHRHLRCHHCDSQRPIPRQCPQCGTTNLIPVGLGTEQLEDGISQLFPDIPVTRIDRDTTSRKGALEQQLADVHQGGARILIGTQMLAKGHHFPDVTLVALLDVDGALFSADFRAAERFAQLYTQVSGRAGRAGKQGEVVLQTHHPDHPLLQVLLEKG

SEQ ID NO: 5757 - protein, 60 aa, Xenorhabdus sp.
MGPVPALQAKRSGRYRWQLLVQHPSRIYLQKMMTEVYPGITALPLARKVKWNIDVDPTEG

SEQ ID NO: 5758 - protein, 275 aa, Xenorhabdus sp.
VAQRDYVGRGHSNPRKKGSGKKKNQAKGLPKTLLVIAVALVVTFIGGLYFIVHTKHESEKNIPTVAHQPKGHSLPPKPEERWSYIKELENRPVGLPSIQDPSLTTGQPNNRPAELTPEQRQLLEQMQADMRQTPVQLTEVPYNSEPVPRSRVIINPPSQQPPSEYAPQQNKPSVPLQSPQAQVPQSQASNETTKPKTETNGSRIMLQCGSFRTMEQAESVRANLALAGIESKITTKDSWNRVVLGPYKNRESAEKMHRRVTNTGIPSCILRPAGG

SEQ ID NO: 5759 - protein, 176 aa, Xenorhabdus sp.
VTTIVSVRRNGQVVIGGDGQATMGHTVMKGNVRKVRRLYNDKVIAGFAGGTADAFTLFELFERKLEMHQGHLTKAAVELAKDWRTDRMLRKLEALLAVADENASLIITGNGDVIQPENDLIAIGSGGSYAQAAARAMLETTELSAREIAERALTIAGDICIYTNQNHNFEELPSKA

SEQ ID NO: 5760 - protein, 443 aa, Xenorhabdus sp.
MSEMTPREIVSELDNHIIGQDKAKRAVAIALRNRWRRMQLDESLRYEVTPKNILMIGPTGVGKTEIARRLAKLANAPFIKVEATKFTEVGYVGKEVDSIIRDLTDAAVKMVRLQSIEKNRYRAEELAEERILDVLLPPAKNNWGQAEEQPEQSSTRQAFRKKLREGQLDEKEIEIEVAAAPVGVEIMAPPGMEEMTNQLQSMFQNLSGQRQKSRKMKIKDAFKLLVEEEAAKLVNPEELKQQAIDAVEQHGIVFIDEIDKICKRGQTSGPDVSREGVQRDLLPLVEGCTVSTKHGMVKTDHILFIASGAFQVSSPSDLIPELQGRLPIRVELEALTTEDFERILTEPNASLTEQYKALMATEGMHIEFTTDGIRKIAEAAWQVNETTENIGARRLHTVLERMMEDISFDASESQGQSVEINADYVKSHLDELVADEDLSRFIL

SEQ ID NO: 5761 - protein, 299 aa, Xenorhabdus sp.
SQMQAWLESLRPKTLPLAIAAIMTGSALASWTGHFSWPVALLAFLTASLLQILSNLANDYGDVAKGSDTEKRIGPMRGMQKGLITAQQMKTALKITVLLSCLSGIALIAAACHNLGDIIGFLGLGLLAIIAAITYTVGAKPYGYMGLGDLSVLIFFGWLSVLGTYYLQAQTFSLSTVLPATACGLLSVAVLNINNLRDIETDSQNGKNTLAVRLGGKKARYYHAALLTGAMSCFIAFTLLYLNNSGYSWLFLLAFPMLLKHVLQVLRDPTAEGMRPQLVQMVKVALLTNILFSIGLILN

SEQ ID NO: 5762 - protein, 170 aa, Xenorhabdus sp.
MKYDTSELCDTYQEDVNVVEPLFSNFGGRTSFGGQIITVKCFEDNGLLYDLLEEPGRGRILLVDGGGSVRKALLDAELAQLAVNNEWEGIVIYGAVRQVDYLAEFDIGIQAMAAIPAGSSSEGIGDSDIRVNFGGVTFFSGDYLYADNTGMILSEVPLEIDGDEDNDEVS

SEQ ID NO: 5763 - protein, 265 aa, Xenorhabdus sp.
MGQTTTPTLSGQCISEFLGTALLVFFGLGCVAAARLAGAQLGLWEISIIWGFGVALAVYLTAGISGAHLNPAVTIALCLFASFDRKKVLPYIIAQMLGGFVAAALVYMMYYNLFLDYEQVHNIARGSQESLFTAGVFSTYPATQISVFHAFIVEVIIAAVLLCLILALTDDGNGIPRGPLAPLIIGILIAVIGGSFGPLTGFALNPARDFGPKLVAYFAGWGNIALTGGRDIPYFLVPLVAPIIGAILGAFGYRKLISRHLPREN

SEQ ID NO: 5764 - protein, 507 aa, Xenorhabdus sp.
MTTENITDKKYIVALDQGTTSSRAVILDHDANIVSISQREFPQIYPKPGWVEHDPMEIWASQSSTLVEVLAKADIRSDQIASIGITNQRETTIVWEKETGKPVYNAIVWQCRRTADICTRLKKKEGLEEYIRHNTGLVIDPYFSGTKIKWILDNVEGVRQRAENGELLFGTVDTWLVWKMTQGRVHITDYTNASRTMLFNIHDLDWDQKILDELDIPRVMLPKVAASSAIYGQTNIGGKGGTRIPIAGIAGDQQAALYGQLCVHPGMAKNTYGTGCFLLMNTGTDAVRSSHGLLTTIACGPRGEVNYALEGAVFVGGASIQWLRDELKLIADAADSEYFATKVQDSNGVYVVPAFTGLGAPYWDPYARGAIFGLTRGANSNHIIRATLESIAYQTRDVLDAMQADSGARLQALRVDGGAVANNFLMQFQSDILGTRVERPEVRESTALGAAFLAGLAVGFWKDLDEVKSKATIEKEFRPGIETTERNHKYNGWKKAVARAQEWEDRA

SEQ ID NO: 5765 - protein, 248 aa, Xenorhabdus sp.
MANWVTGKVTDVTNWTDSLFSIKLHAPIEKFTAGQFAKLALEIEEERIQRAYSYINAPNDNSLEFYLVTVPNGKLSPQLATLQVGDEVLVTEQAAGFFVLDEIPDCQNLWMLSTGTGIGPYLSILQQGSDLERFENIILVHAVRLEQDLSYLPLMRQLEKTFQGKLRIQTIVSREQCQNSLMGRIPALIENGELESAIGLSMQAENSHVMLCGNPQMVRDTQQLLKEQRGMTKHLRRRPGCVTSEQYW

SEQ ID NO: 5766 - protein, 206 aa, Xenorhabdus sp.
MKTGINKLLLTILIAFGIGLPFSGTAGEPSVTPDLRPQLMYLLPDSPTFEDNIPTFREKYNKSHPDILLHEYKVITSTDISLPFIRAASKINEKIYSSAVLERGSEKIKSLQITLLPSQLTQEKEQNLLLTKKYIAAITRQFEPTLSLEQAQTQTEKLFKMAETQPFYSLKIGAIRYIIVNSSENIMTFAIEPIKLSLSDVPANEN

SEQ ID NO: 5767 - protein, 255 aa, Xenorhabdus sp.
MRHPLVMGNWKLNGSTHTVNDLIAGLRKELSNVDGCGVAIAPPTVYVTLANNALAGSRIALGAQDVGINLSGAYTGETSAEMLKDVGAKYIIIGHSERRTYHKESDEFIAKKFAILKEQGLIPVLCIGETEQENEAGQTEAVCARQIDAVLNTLGAEAFKNTVIAYEPVWAIGTGKSATPAQAQAVHKFIRDHIAKQDAAIAEQVIIQYGGSVNASNAAELFTQPDIDGALVGGASLKADAFAVIVKAAAEAKKA

SEQ ID NO: 5768 - protein, 183 aa, Xenorhabdus sp.
VNNVTGVRAKQKEKTRRSLIEAAFSQLSAERSFTSLSLREVAREAGIAPTSFYRHFRDVDELGLTMVDESGLMLRQLMRQARQRIAKGGSIIRTSVSTFMEFIGHNPNAFRLLLRERSGTSAEFRAAVAREIQHFIAELADYLEQASHMPRHFTEIQAEAMVTIVFSAGAKALDIDEEKRRRL

SEQ ID NO: 5769 - protein, 459 aa, Xenorhabdus sp.
MALWGGRFSQEADQQFKQFNDSLCFDYRLAEQDIVGSVAWSKALVTVGVLTSEEQQKLELALNALLDEVRTNPEAILQSDAEDIHSWVEGQLIAKVGDLGKKLHTGRSRNDQVATDLKLWCKDQIADIRQALTALQQALVITAENNQDAVMPGYTHLQRAQPVTFAHWCLAYAEMLARDESRLQDTLKRLDVSPLGCGALAGTAYNIDREQLASWLGFASATRNSLDSVSDRDHVLELLSNASISMIHLSRFAEDLIFFNSGEADFIELSDRVTSGSSLMPQKKNPDALELIRGKCGRVQGALTGMMMTLKGLPLAYNKDMQEDKEGLFDALDTWRVCLHMAAMVLDGIQIKRERCREAAKQGYANATELADYLVAKGVPFREAHHIVGEVVIAAIKKGRALEELSLSELQRFSETISIDVYDILSLQSCLDKRLAKGGVAQKQVTLAIAEAKQRLHLS

SEQ ID NO: 5770 - protein, 410 aa, Xenorhabdus sp.
MTTTTTSVKNSIKKIVLAYSGGLDTSAIIPWLKEHYGNCDVIAFVADVGQSREDLEGIEQKALRSGASECHIADLREEFIKEYVYPVLKTGALYEGSYLLGTSMARPIIAKAQVELALKVGADALAHGATGKGNDQVRFESTYTALAPHLKVVAPWREWDLRSREALLDYLKVRDIPTTATLEKIYSRDENAWHISTEGGVLENTWNAANKDCWEWTVEPEDAPDEPEYLSVTVEKGEVVGVNGKILSPYQCLNELNELGAKHGIGRIDIVENRLVGMKSRGCYETPGGTIMMAALRGIEQLVLDRDSFKWRQQLGLEMSYVVYDGRWFVPLRQSIQAAAEMLAENVSGEVILKLYKGQVTATQKTSPHSLYSEEFATFGEDEVYDHSHAEGFIRLHSLSSRIRALKSKK

SEQ ID NO: 5771 - protein, 119 aa, Xenorhabdus sp.
VAIVIDDYDKAIDYYTNKLGFTLVEDTPQPGKRWVVVTPNPESDCNLLLARASNEKQEAFIGNQCGGRVFLFLQTDDFWRDYHKMKENGVHFCEEPRQEEYGLVVVFEDIYGNRWDLYQ

SEQ ID NO: 5772 - protein, 673 aa, Xenorhabdus sp.
MKEKRFKLSSSGRLAVSVAIFMLFSSSGFSNGIVAGGDDSHRPGVTQSKSGADVVNIVAPSESGLSHNQYEDFNVSEKGAVFNNSTNGGESQLAGELPGNSNLHGNSATIILNEVISRNPSLLLGKQEIFGMAADYILANPNGITCDGCGFINTNQLSLVGGNPLVEKGTLQGFNTLDNTNSLKIGRGGLVHDSIINIFSPKIDSHGKISTSQDINIITGLNKISADGRVLDSKKATVGLLDSYYLGSMQAGRIRLLSTDKGSGVNLQGEMTADDTINVESKGGLKLEGARLKGGDLTLKGENITSQGALDEVSLKKEKSEGNFFSGNSASSEQKSQVLHRTKLEGRNITLNASNNNEIKGTDIFGENINLTGRKLDLDGQAVNQHSEDFQEQWKFLWKRNKKNTHDKTQQEGNDIRADNNIKLTSTGEDIRIDGSKIDAGNNLSLSSKRNVIIDGLIETEKMDNQQYHRLESNSLDTGLKEKGHFTQKQIRSELNADNDLGIEANGDIKIAGSKAHAGNNIIIKAGKKNQIIAQYYGDKVIDDDNRTYWGGIAGGKNKNNYIEDKKNQSSDITADGHVLLVGNDGIKITGSNVEAEKGGYFQSKNGDLRIDNAVNYHQNIIDERHGTVLNITKDSNKEKEKKEEAVHSQVKSNANLKIFKWKKMVECSWLVY

SEQ ID NO: 5773 - protein, 725 aa, Xenorhabdus sp.
EQENITQKRAVLDGGNITINAGKDVTVVGSDIDTRNGNANISADNISFLASNDLEAQKESHSSTKFGVFFSKGNNGVSIGGGANHSSNNKSHEKKKAVVSKTDIEGDLKLNARNKLKQEGAQHNVAGNYEASANSIENRAAESSDSTSSGNFNIGGGVALSLSMKNYSPNVGANVFAKGGNHTESNTKSNANVTSIKANNNIRINTKEDIYDQGTQYQADNGGIELKANNHINEAAFNKNEKDVFDSSGHASIQADLAPFSQDLTVTGRGKGNASRSSESNSDAIVSDFKAHKDINIQARHDIKYQGTSFNSEDGETTIQAGNNISINQANNTHKKTKTQYGVGLGVGVGVNLPTGVVNMGAGSAAAGYAVNDDTTVTAKSSNINGKQGVNLVSGNNLSLQGTNTSGEHINLKAERGGIIVTSAQDSINKSHFQIGANLGGGVAMNGSQLAKIEAKAYGKFGNGYERDVINHNSHISGENVTLTSKKDTTIKGANIVANTMGGKVGGNLNIETAQNTANGSKIGLEAGGGFNSGTLFNDNQPSGFMGVVNTIKSIVSGIKTKFNFNYETHDDTGLTNQSGISARDGVNLDVSGKTNLTGAKIESTDQPVILNTKELVNHEITTHSKGEKLSVKLPGSPLEFLLSLPGVVSDIAHGKIPYTERHYHNKKNVILPSKVKEYTQKMSNCNVAVKDKIIENIDNNMPKKTVTEVIGCGQQLGNQKDYGV

SEQ ID NO: 5774 - protein, 519 aa, Xenorhabdus sp.
MKWSLMIQGTASDVGKSALVAGFCRIFLQDGYHCTPFKSQNMALNSGITADGKEMGRAQIFQAEAAGITPDVRMNPVLLKPSSDCKAQVIFMGKVMCNMNAVEYHEYKPQLQQQILSAYNGLAAETDIMVLEGAGSPAEINLRDRDIVNMGMAELVDAPVILVADIDRGGVFASIYGTLALLTPEERARVKGVIINKFRGDISLLHSGIEQIEELTQVPILGVLPWLELDLEEEDSVALQVGKYERDKNKTERCLNIVVVRFPHIANFTDFNALALQPDVYLNYIADPLELQNADLIILPGSKNTLGDLGWLKTQGLDHAIIAAHQSGIPIIGICGGYQMLGKQIIDEVESGLYQMEGLGLLDTETLFANDKQTAQVRGIVMPELSGMLNLCGDQPIVGYEIHMGVTRLKEQARPFAKMYLRNGEEASWFDGAMNQEGTVMGSYLHGLFDQNNFTRPLLNQLRMHKGINPLENAAFSYASHKEKQFNILAASMREHLDIERIYQLMKEHTESSSSGVIR

SEQ ID NO: 5775 - protein, 181 aa, Xenorhabdus sp.
MILITGGARSGKSAYAERFISDQCEQVLYIATAQGTDEEMLARIERHRKDRPLHWRTWEGYQDLGDVIRRHRKAEEGIILECVTTLMTNLLFDKAEGASPDEMDFASLEVFIHQQIDDVIDACLNCPMPVCLVTNELGMGIVPENRLARHFIDISGRVNQKLAQAAKSVWMVVSGLGVKIK

SEQ ID NO: 5776 - protein, 251 aa, Xenorhabdus sp.
RLFWATLQFMTRLPIPAKWAEGIDFRQIGHGVPIFPLVGLIVGAIAACIALVITQSGGGVYIGAIGYALALVFLTGGLHLDGLADTCDGIFSSRNRERILEIMQDSRLGTYGGLGLIFCILLKVLAVVEIAYHPPLHLLALLSCAPIVGRTAVVLLMFEQRYAREVEGMGSSYIGRITPRETVITLLAGTVLVMLLGDWQGLSAMLVTMIAIFLLAIYFNYHLGGQTGDTLGAAIEVGEVIFLLALILIWK

SEQ ID NO: 5777 - protein, 363 aa, Xenorhabdus sp.
MEFQSLPLLLEKIKPLDRERMDRVGQHIDKLVKPVGSMGRLETLAAQLAAMPGIGKLRDLQKEIIVMCADHGVYNEGVAISPKNVTAIQARNMLLGLTGVCSLAKSNGTHVLPVDIGIDCEPIDNLLSLKLACGCGNIAQGPAMPYAYAETLLLASVQLVQQRLAAGISVFGVGELGIANTTPAAAVISVLTGSDPSDVVGLGTNLPAGLLKHKESVVRQAIDVNKPDTQSPLDVLAKVGGFELVGMTGVILGAAAAGVPVVLDGFISYASALAAVQLAPSVRDYCIPSHLSAEKGAVLALQHLGLKPHLHLDLRLGEGSGAAIAMSLIDAACSMYCDTGYLAESGITFSELLVFTSSGIFYF

SEQ ID NO: 5778 - protein, 107 aa, Xenorhabdus sp.
ISTFMALDIRVGKIIKAEKNEKAIKPAYKLYIDFGSEIGEKQSSAQLCQNYTEEQLIGRQVLAVINFPPRKVAGFKSEVLVLAAVCDNEGTVLIQPDKNVTLGTRML

SEQ ID NO: 5779 - protein, 73 aa, Xenorhabdus sp.
ALKDLVLYVPLPLDEKREYQTLAGLLMEHLQYIPQLGEQLKIGDYLFEPMEITSHRINKVKITSLKVEEETVE

SEQ ID NO: 5780 - protein, 258 aa, Xenorhabdus sp.
MLTMLVRLNLIYILNLSLKEFAMEIFDIMQPLSRYDLDVNFSSTLHISGGQHTIHVEENNTAYGFVHQGDLTVSIDGTSQQLREGMYFSIPGPAELSPFVGLICIRNGYKGFLSFGGPVERLGRLKYIDGCSDSLLISPPLKGDPCLNYLYVPPRLNQTAHTHPSVRIGIVIEGAGYCLTEKSKTDLIAGGIFLLPTDEIHSFHTDDTPLRIVVYHPDSDFGPTHEAHPMINRTWVDGISLAGENRYRTRQINEFGTE

SEQ ID NO: 5781 - protein, 467 aa, Xenorhabdus sp.
FSRSLKQAGICDLGVVPIPGATVLLPWGVALSEIIATRIRTAYEAIELDEYAYPHVIAESCFEPMADLLDTERNLLRVATTIDTQSQRERGILLPTGEQVIASHWKKMINTPDVMPIRMFQRARYFRPLSSADRSGKGVFSALEAADIFEFHCCHRTQDAALLDLQRIDSSLTALSASLPLPQIVGVRPPWGNRSELYQWAIGSDTPLPSGECVQTSALYFQGQELSRRYDIGFGKGEQRQHAWQLDGFISRRVLYAQLYLSARANGLLTVHPRLAPTQVVILVRSRHDDEKKRMQELASMLQAAGLRPVLRYCEESKALTAAQKHWRDRGVPLLLLFFGRRSANDSPRIRLLRADKELELDQPGNSSADWLTKQVTHAITDVENDVNYTIIHQARNQISFASSEAEACQALSARQCVIAPICPTRSHTDKVASWKMGELCSFTAALEPQPCILSGRPTWARALLSR

SEQ ID NO: 5782 - protein, 594 aa, Xenorhabdus sp.
MLINPNDFRNYIVKQVQKKSGYQLVLQDDLRWHVWPKLSILTGQVSLTAPGAKKPAIVAENMRLDVELLPLLSHQLAVKEVMLKGAVFRHTPDSQPQQKPEAPIAPESDIHYPVEGNGQSWKLDIDRIKVEDSLLIWQTNSHSQLNIRDINLLMKRQDQHHINLELNSKINKNQQEFAFELDADINIADYPQYITGDMNSFKYQLTGVGLPSEGITGEGSAFVRYDAFSSFISLQKIALKINESELAGGVDINLKDKPAYSINLSSPELNLDNLLGWDKLVKNSFQEKIDYRMENNLVKPVIAKSVSPLSNYDLSFLKGFNAHLLFKANKFIYQGMDIDNFVFKAVNNAGMANISKLSGNAFGGYFALPATVDATVNPAKLHAKPLLQNIDLQPLLKALDLPSVFSGQLALDGDLFGEGYDEYAVAHYWQGDLNVNLKNARLDGLNIPMLIQQSFSRVTDQVKQPTNTQSFTGAQNLSVKAKFAQGEIKINSLSANSEHSKIEGQGKANLLKQNVDVALLVQLTGGWGQQNELVSHLEKLKVPLRIYGDWNNLQYALNVESILHDELQQKVKQSIKNWFDNIDSSKNKKKATEK

SEQ ID NO: 5783 - protein, 193 aa, Xenorhabdus sp.
MRLCDRDIIKWLDEGKLVITPRPPVERINGATADVRLGNQFRVFRGHTAAYIDLSGPKAEVNAALDRVMSDEIILPDGEAFFLHPGELALAVTLESVTLPANLVGWLDGRSSLARLGLMVHVTAHRIDPGWHGQIVLEFYNSGKLPLALRPGMVIGALSFEPLSGDAERPYNRRQDAKYKNQKGAVGSRISED

SEQ ID NO: 5784 - protein, 219 aa, Xenorhabdus sp.
NQVIFSMADEAHKCTIVGIAGASASGKSLIANTLYRELRAQVGDHNIGVIPEDCYYKDQTNTPMEERIKVNYDHPSSMDHDLLFEHIQTLKAGNSIELPQYDYAEHTRKSKSIHFEPKRVIILEGILLLTDKRLRQELDFSIFVDTPLDICLMRRIKRDVNERGRSLDSVMERYKKTVRPMFLQFIEPSKQYADIIVPRGGKNRVAIDILKAKIGQFCE

SEQ ID NO: 5785 - protein, 94 aa, Xenorhabdus sp.
VDTLVIKCKRALEQTGFKRLVMAGGVSANRTLRIRMQNMAEKLRGEVFYARPEFCTDNGAMIAFAGMIRLASGTKNNLGVTVKARWPLSELPSL

SEQ ID NO: 5786 - protein, 219 aa, Xenorhabdus sp.
LIITLAMPFFIYGSLAKADTQTFGIGYSNSQISTPANTYLDGINIHYRYEWDSPVSIIGTFTHMRGNTDQVVKYTNPTSGTHQSTLSEQPVAFKSKYFSLMVGPAYRINDYLSIYSLIGIAHVTNSAHKISIDTNDGSVGTGGVNPAASGGFDILPTSDETLKTNELAYGAGIEINPVKNFSVYLAYEVTRSKHAPRGSRNEGVNNFINGFNVGVGYRF

SEQ ID NO: 5787 - protein, 190 aa, Xenorhabdus sp.
MRMKCFDYTELPREQWVGGIGEVRDIVCWPNADDFAWRACFTSIHKNGVLGHFPGIDRSIVLLKGKGLRLTSPGFLEHELVQKIAPFHFSGNTPGNAELLDGSVQCFNIMTRNSEWVSEISFVTDERKLPTSHSGVLYVLKGRWEITGTNNVQLAFGQGAWWLPDEIREGVIKPLVTDSQLLWVDLHSAE

SEQ ID NO: 5788 - protein, 510 aa, Xenorhabdus sp.
VAGVRERRQQRGNLKDEVYNSGNALLMTYNTLRKTRYMTRYEQLAVTIRQQIEDNIWLVGDRLPSLRESVKSSGLSLMTVLQAYQLLESQGWIVARPQSGYYVAPRIKPFAAAKGGNRLNLSENVEISASIFDVLQACKDPRIIPFGSAFPDPSLLVEPKLAKTLASVARRFAPHSSLVNLPPGNEQLRRNISRRYASQGMHVSPDEIVITAGAMESLSFSLQSVTSPGDWVVIESPAFYGALQAIERLRLKAIAIKTDPKTGIDLDVLEEVAGKYPIKACWLMSRFQNPLCVSMPTENKQRLVEILNENEIVLIEDDVYGELYFDQNPPMPVKAWDKENNFMHCSSFSKCLAPGYRVGWVAAGKHALKIQQLQMTSTVSASIPTQLAIAEYLSQGGYDNHIRRLRRQLEQRQIQMLRAVSEYFPDSVKVNSTRGGYFIWLEFEPPFNARRLYQLALAKNISIAPGSMFSTSSQFDHAFRLNTSFVWNETQTAAMKTLGSLCRMLLKEYG

SEQ ID NO: 5789 - protein, 336 aa, Xenorhabdus sp.
FKAAAVQAAPIFLDTEATVDLVCRLIHEAANNGASLVAFPEVFIAGYPYWNWIMNPVQGSPWFEKLCKSAIEVPGAEILKVAQAAARHHINVVVGINERNPNGVATIYNTLVTISDEGKILGRHRKLVPTWAEKLTWANGDASSLTVHNTSIGPLGVLACGENTNPLARFTLLSQGELVHVASYISLPVAPPDYDMAEAIRLRAAAHCFEGKVFTIVSCSTISPEIVQAMTASHPEAKHLLARRNSAFTGIIGPDGRVIGTPLIDKGGIVYAEIDLNRCIQPRQMHDITGHYNRFDIFDLAVSRRAMNAVRFTDEPEQTDFNPVVDGVNPIREDLP

SEQ ID NO: 5790 - protein, 303 aa, Xenorhabdus sp.
MRLITYRTEITAEARLGAIVNNNVVDLAKLAAHSGSTLPDNMLDFIELGPLAISSTAMLLNSFDGLWPVGVIRPLENVKILAPIPRPRKNIFGIGLNYVEHIEESSRLLDTAKDLPKEPVIFSKPPSTVIGPGDAIEHNSEITRQLDWEVELAVIIGTRAKGVSEADALKHVFGYSLIIDMSARDCRRAGQWIYSKGQDTYAPFGPCIVTADEIPDPHNLALSLKVNGVTKQDSNTRHMLFKVDALIADISKGIVLEPGDIIATGTPSGVGAGRNPQKWLWPGDVIEAHLEKIGDLRHPVIAV

SEQ ID NO: 5791 - protein, 381 aa, Xenorhabdus sp.
VQEYEQNRQESHDQYREDILGRANVADSPELLAYYKELAKYHTGALWTIANKIEPWQPQSTSVPVLWRYRDLREHVLKSAELVTPEKAGRRVVYLENPGKSGEGPAVGLLYSGLQTMQPGESASAHAHSSSALRFIMEGRGAYTIVDGQKMLLEANDFVLTPNGTWHEHGVEPDGSPCIWQDGLDMPLVNTLEAGFYKVHPDLRQAVTEPVDSSVALWGAPALRPQNVGWDKPYSPLFRYQWKPTYAALQGYARISRGSPFDDILMYYINPLTGGHVMPTLGASMQLLRPGFIGKAHRHTGSFIYQVAKGAGYSIIDGQRFDWQERDIFCVPSWKYHEHANASQTEDACLFCFSDLPVMQALQLYYEEALNENHGHQRVGE

SEQ ID NO: 5792 - protein, 375 aa, Xenorhabdus sp.
PDQSSPLIPPILTPYQVRGIRLKNRVVVSPTLLYKAVEGIPGTFHQIHLGSRALGGAGLVIAEMTAISPQARVTPACPGLWNEQQVQGWKIITDFIHQNTDARIGIQLGHSGRRGSTQRGWEQVNHPLPEGNWPLVSASSMPYLPGISQVPTAVTQKQMSEIISQFVEATHRAITAGFDWLEIQAAHGYLLSSFISPVTNLRDDEYGGALENRLRFPLAVLRAVRRVWPADLPISIRISATDWIKGGTTVDEAVIIARTFYEAGADMVDCSTGEVSAEQQPVYGRMYQTPMADRIRNEGNVPVIAVGAITDADQINSIIASGRADLCALSRPFLSDAAWLLHECARYGWTDINWPEPYLYGKEQLERQLAQKSIL

SEQ ID NO: 5793 - protein, 282 aa, Xenorhabdus sp.
QKITEYSSGSLSGTGSQAGIWTQVQDKQKVARQYQADLLIASDGINSQIRNRYAENFWPDVEQRHCRFVWLGTHRIFDAFTFLFAETEHGWFQAHAYQFQEGLSTFIVETTEDTWLAAGIDKMLQEEGIAYCESIFAQWLDGHGLISNATHLRGAAIWIRFPRILCNHWVHWIKPEGDKGKNVPIVLMGDAAHTAHFSIGSGTKLALEDAIELANSLKANKGNLSAGLAHYQKLRSVEVLKIQNAARNSTEWFENVARYEDFPPEQFAYSLLTRHSVFPMKI

SEQ ID NO: 5794 - protein, 54 aa, Xenorhabdus sp.
VQFGRQAVFSITNKLNAKSANLTKQHTAISIDVNITNPLLLRLLSISGMDMNPT

SEQ ID NO: 5795 - protein, 135 aa, Xenorhabdus sp.
  unsure (1)..(135): unsure at all Xaa locations
MVRIIILKHFHNLSDEKMEYQLLDRMSWQRFCRLTDVINIPDRNTIWCFEKRIGQEGARALFEEAKHQLSAQGFIPRGGQIIDATLIPVPKQHNKKEENEQIRQGKTPDNWTVNKRCQKDTEATGRKSTVSXXRA

SEQ ID NO: 5796 - protein, 1713 aa, Xenorhabdus sp.
  unsure (1)..(1713): unsure at all Xaa locations
MDINMMRSDNMPIAIIGMSCRFPGGVSSPEEFWQLLCGSSNAITPVPPERWSTQAYSYRDRNLPGKMVAREGGFIADVTGFDAAVFDISNTEAPFIDPQHRLMLQVTWETLERARIAPKSLAGQAVGVYIGAFTHDYMHLQFTDLRQTTGYTSTGAMGTMLSNRISHAFDFQGPSLTIDSACSSSLLAVHLACESLRRGESQLALAGGSQLMLMPDFSIVESRTGFLSLTNRCHSFSANADGYVRSEGVGAVLLKPLNAALQDGDPVLAVIHGSAANQDGHTPTITQPSSSAQQRVIRMACAQAGISPEEIDYIEAHGTGTGVGDPIEAEALGLGAXXXXPXDRPLLIGACKSVIGHTEAAAGIAGLIKAVLCLQRGQVPGNLHAEPPNRHIRFIELGLQVPQQLTPLSEGKVIAGVNSFGFGGTNVHVVLSNNAEPSVQLRTTQGQAFMLPLSAQSEFSLKQQAQSIADLLQQQPDIALDDLCYSLATTRHCFPLRKGIAFSNREQLRQRLTNLNVSSEHNNKKVDRLAWIFAGIGSEDWQDSIAWFQQFPEFTEQFERCEAIWTGFSAPSLYAALISADELIEPPMQFAVQISMAAQLQKWGFKPAALLGHSSGEMAACYLAGIYDLTQALTLLHQRYHYLERVLNKGGGLLIVAATVEQILPHLSAPGVEPAVVIAGRNSINRCLLSGPISELTAVAERLKQQRIASSWLNYRIASHSHYIESIRAGLTADAATVPAAEPLLPVFSSVTGELINGKLNPEHWADNVVSSLRFDDAVENMLKAGFHHFLEVSPKSLLSSGLKDWSQPYRGQVFACRSGQNWPQLLGQLFESGVEPDWRALMPTACPIDLPTYSWHQQSYWHEPEISRRRRLRILSGVLLGEAQPGSESWQAELTVEQVPWLLDHVVMGNAMFPAAGYIEIMLAAARICFPDVGLALDNIVLQSALLLEPGIEFRLKTQLDRQRMEVQVHITRNLDESVHYQLAASAQVNIVVPGATACAIPPLAVNDRYPCMWNQEMLYQAFQHLHFSYSGVFCTLRHAFVGKEETICEIELPPAPEGMNFHPAALDGIFQSLLAIQSADVHAPIPANEFRIPVSIQHLRINGKLSGRVHVHARNTKQTQQQWIGDIDVYTDSGMLLCQISGFCVQLVGNRKNSLSAKLHNLVVGQPQWRKLPAQPSTESVTQWAILGGENALAEELVDELQRRGGCASLYSGLPDSYQKIQELVDTLPVETERILVLWPLQAPRMAYHSLIHLCAALAERSIKPRLWIVTQCAHQITEQDQPDPFAAALWGMMRVIGQQEATALWGGLLDIDSITAPAKWWDALLIGDDEDQLALRHDQRYVLRLAPLPEIPALPPVRFRPDGCYLLTGAFGDIGRQLIPWMVQHGAQHLLLIGRRLALDAADQKLLEMLHQQGIEANYLPVDLGDVESTRICLAEYRQQASQPLRGVIHCAAHVEDQGYRELSPEAFDRVFATKALAAWTLHQALADAPLEHFVMFSSLAALLALPGMASYAAANAMLDSLACLRRQQGLPALSLNWGPWEAGIALRDSRTLPILENSGLQPFGSEEGLAVLERLFARIEPQLVPFLANWSNLLSSQMRHLPLLRDIQQENVVQTLPIEAALAVSDLDDIVSLLQTFCGEIVGTSTEVFHPDLPLTNNGIDSLNGLMLVQKINKQLRLDIPLELLLSDKPLAELASLITYRLQVKEITK

SEQ ID NO: 5797 - protein, 457 aa, Xenorhabdus sp.
VRLWTLPNTDFTQAQMDGVNLSSQKLDQVIFLMASMKKANLDYTSLNGAVLVGANLAGATILGNVSLVGANLSNASLENVNLTGAQFGALSTVTHLDKADAQTLDNQQLPERLRQMLYQGKILVNGQAEVLVRQPGQNWLVEHDGKPLFIHYQDGQLNVAQDNGGNAAILANTFMPNAILTGANLYAVDMSGAHWYGSNARADNANLEQVNLSNANLATMNFTQARLFGANLSYASLVNTDFSKAMLEPTEGLKPASLAFASIQGTIFTEAKLTGANLTNGAVALPFEETGNKLTGVPLFSAALELMSSLNSGTVSKELRQVFTDNGYSLLSNAKLIEKQSDQYWIISNQPPDTDLNYRGYCNFMVIRVSEVGNNHLQVCGGSPLRIIRTAADNTLQPVNVAFGVTVDITQAMDGATTCPSGLRYQLLNTGISYQSLMTPGLPPHPPKCIPSPTTWC

SEQ ID NO: 5798 - protein, 268 aa, Xenorhabdus sp.
MVLSYGSHNISHFAEVPEHYFLPHHVTLIKVVGDKSGPYRSSLPVLYHLSYHIPNAHLHHYAKRNREKLTVNNIEMALPGKLSALGVNNQHLARNSIHYADLWVAANEIKTPWDVACSIVFSHPELSNSQAYAASIVTHSHIAPPEAIDPLQYNRVYELAISISSQGPATETGGFATYGQLVDPDGNAMFYEFDWVGQDGQVIFAEGDPVMQYNLSDDTENYSGSPTSNALKTSHNDGRLQNHNWSVSQSASLDVAEYGFYSGADGWR

SEQ ID NO: 5799 - protein, 486 aa, Xenorhabdus sp.
VSELSTLSPQPLWDIFAKICSIPHPSYHEEELASHIIEWAEDKNLHVERDEVGNILIRKPATKGMEDRKAVVLQAHLDMVPQKNNDTQHDFAKDPIRPYIDGDWITAEGTTLGADNGIGMASALAVLADESVKHGPLEVLLTMTEEAGMDGAFGLQPGWLQADILINTDSEEEGEIYMGCAGGVDYVSTLPLSREPLPANYQTLQLTIKGLKGGHSGGDIHLGLGNANKLLARFLAEYSDELELKLIHLQGGTLRNAIPREGSTIIAVPTAQLPKLHQVKDNYLEILKNEYAVAETNLTLLLDDVKTSSQALTADCQSRFIAMLNTMPNGVIRMSDVAKGVVETSLNVGVVNMEEDHVEVICLIRSLIESGKAYVVGMLNSLAKLSGAEATASGDYPGWQPDADSPVMHLVRETYHQLFDSTPNIMVIHAGLECGLFKKPYPDMDMVSIGPTIRGAHSPDERVHIKSVGQYWQLLTAILKAIPVKE

SEQ ID NO: 5800 - protein, 38 aa, Xenorhabdus sp.
VQSLKTPADIEAAYRFTRNQAINATSIAEAGFAATAEH

SEQ ID NO: 5801 - protein, 176 aa, Xenorhabdus sp.
MKQTLFIVGARGTGKTTIGNVLAEVLSYQFVDTDEDVQISCGMTIAELVEQRGWDYFRKLESETLKAVSQRNRVVSTGGGMVLAAENRQYMRQNGIVVYLQAPASVLVERLSLNPENSQRPSLTGKSITEEITGVLAEREPLYCECAHLIVDAALSIENIVLEIQSYILSQYKQII

SEQ ID NO: 5802 - protein, 427 aa, Xenorhabdus sp.
MLEQMGKAAKAASWQLAQLSTSQKNQALSHIADLLEKEAQVILTANQQDMEQARKQGMNEALLDRLLLTPERLSAIANDVRQVCRLADPVGQVMDGQLLDSGLQLSRRRVPLGVIGVIYEARPNVTIDVASLCLKTGNAVILRGGKETHHTNQAMVKVIQQSLEQSGLPASAVQAINKPDRELVAEMLKMDRYIDMLIPRGGAGLHKLCREQSTIPVITGGIGVCHTFVDEHVNFEKALEVITNAKIQRPSACNALETLLVHEKIAADFLPELSARMKAQGVTLHAGASAMALLQDGPAKVVAVTEEDYCDEWLSLDMNVEIVSNIDKAIEHIRHYGTAHSDAILTECLQHADYFVHRVDSSAVYVNASTRFTDGGQFGLGAEVAVSTQKLHSRGPMGLDALTTYKWMWLRRLPFPSIMTIFILSNI

SEQ ID NO: 5803 - protein, 368 aa, Xenorhabdus sp.
MMNGRQTLVVKLGTSVLTGGSRRLNRAHIVELVRQCAQLHEKGHRIIIVTSGAIAAGREHLGYPDLPATIASKQLLAAVGQSRLIQLWEQLFSIYGIHVGQMLLTRADLEDRERFLNARDTLHALLDNHIIPIINENDAVATAEIKVGDNDNLSALAAILGTADKLLLLTDIEGLYTADPRNNPDAKLIREVHDISDELKMMAGDSVSGLGTGGMATKLQAAGIAGRAGIDVIIAAGNRKNVIADVIEEKSVGPRFHGLTSPMENRKRWIFGAPSAGEIIVDDGAEAAILAKGSSLLPKGIKSITGDFSRGEVVRICSLSGKKLAHGVCRYNSDALRLIAGRHSQEISQILGYEYGAVAVHRDDMIVS

SEQ ID NO: 5804 - protein, 415 aa, Xenorhabdus sp.
MTKQNLSESLFKPQVKQQETSTLVKYVLPSSAHADNKMLGGEHQERWYRMINWLAWIWRGINPLEIQEILSRIAVTDAERSYDHLLDTVIGYRKGNWVYEWSQQAMLWQQKAQHVEQSSEASQCWLRASMLYSIAAYPHLHGDELADQAVVLANKAYENAAHFSDYQLKKLKFQLEDGKTVTGLLHIPPGVQEPCPTILVCSGIDSLQSDCWRLFRDHFLPQGFAMLTVDMPSVGYSARFTLTQDTCALHQQVLQQLDSIPWIDHTRIGIFGFRFGANIAVRLAYLESSLIKGVAVVSPVVHELLHNERLQQKIPSMYIDILASRLGIYHVDEAVLRSELNCYSLKNQGLLGRRCSVPMFSVYWKDDIFSPAEDSKLIARSSLDGSLLAIPAMPAYSGFSKALHAASVWLKDKVN

SEQ ID NO: 5805 - protein, 152 aa, Xenorhabdus sp.
MSEKYVVTWDMLQIHARKLAQRLLPVEQWKGIIAVSRGGLVPGALLARELGIRHVDTVCISSYDHNNQRELTVLKKAEGDGEGFIVVDDLVDTGGTAQAIREMYPKAHFVTIFAKPAGRPLVDDYVIDIPQNTWIEQPWDMGVMFVPPICDQ

SEQ ID NO: 5806 - protein, 369 aa, Xenorhabdus sp.
IILGASLVGLAMGYTLPMVSLKLAEQNRASTIMGIMSALPALGMLISSIIVPILTRLFNLNKLLSFSLLLLAVSTFFSTYLNQVYYLTIPRFLMGFACGVIVVIGESWISDNTSGKYKGTFMGLYTSVFTGCQLLGPLLISIFGIVSLIPAILLSIFSTLCLALIVRNPSSALSQQTEQNEEIKGSFLPLLISAPSLMIGVFCFSFFDSATLSMFPIYGLSLGISEKITITLITLIFLGDAIFQMPIGWLADKTNHQKMHIICGVVFILTLLALPFSINSMFLWVNIIIMGAFGGGIYTLSLVRAGKKYSGQTLITINSLFGIIWGIGSLMGPLITGVAMDIFNAKGFTIILITVGLVFVFSYLLPNKS

SEQ ID NO: 5807 - protein, 164 aa, Xenorhabdus sp.
LEIHNKVIPEKEINIGAGFGPTGIPHIGTLCEIIRTGLVKKELTNLGRKNNFYLISDDLDPFRKIPSNVPNPEKLKDYLGLPVNKVPDPFGVFSSFSEMAETRLLELAKEYGIDCNIIKNSLAYKNGDYNDSIKLFLKNFTTINQICKESTGFLRQRTYNIIMP

SEQ ID NO: 5808 - protein, 186 aa, Xenorhabdus sp.
DAVIFTGTPENAVKVRKHFRKNTLFILNGAGHNPLVISKDADIDLAIESTKRVVLYNQGQDCAGPNSILVHSDIYDLFRDKLILSLKEIEGKVGSYSDYNNIVGPNSDVDHSIKIASLFKLNRSYCTYGGEINPIDGMIKPTVFEKPLVLGGNYKEFFAPVFFLQRYQGDQELADYFSHSNYSANA

SEQ ID NO: 5809 - protein, 220 aa, Xenorhabdus sp.
RFNPVLVVTIAGLVTGLAANMPLLDILEKLGSGFLNTMNLSLTILLPLVIIGLLERHGLKEQAQRAIAHIKSATTGRLLIVYLFIREISAALGLTSLGGHPQMVRPLLAPMAEGAAENQYGDLPKNVRYRIRAMSAATDNTGLFFGEDIFVAFGAIIFMHNFMLNSAGIETEPLHIALWGIPTAICAFFIHSVRLYRLDNKLAKEIASLSHKKHASKEAI

SEQ ID NO: 5810 - protein, 318 aa, Xenorhabdus sp.
VMSWRDKANPRRLTTGLFWGLYGFIFLLGNWSYRLTDLWLDNEVLATRIVHIGVGILVVVMALLAGFGGVRLGNYHQPTPEQRQESATRLGNRLFLPALLIPIITMVGVLAFNHIPGLERAIFGEGNHTTLATLFSITLGCLIALIIAIRITREKIIQPMQETRRLLDSIGCVFILPQILATLGLLFTAAGVGTIISYLTESYLAVDNRFIAVMAYVFCMALLTMIMGNAFAAFPIVTAGIGIPILVLQHGGNPAVMAAIGMFSGYCGTLMTPMAANFNLVPAALLELPDRNAVIKAQIPTGCTLLIANVFSLYFLMF

SEQ ID NO: 5811 - protein, 215 aa, Xenorhabdus sp.
MKTILVTAFEPFGGDATNPSWEAIKRLQGNRVADANIEVHQLPCIFDTSLAQLYTIIDNYQPELVISVGLAGGRPDITVERVAININDARIADNAGNQPIDTPIIVGGPAAYFSSLPIKAMVRALNMSGIPATVSQTAGTFVCNHVMYGLLHYLTQKYPAARGGFIHVPYLPEQATEYTNMPSMSLEIITSALKTAIEVAWENKSDIAVMGGATH

SEQ ID NO: 5812 - protein, 206 aa, Xenorhabdus sp.
MPVITLPDGSQRQFEHAVSVMDVARDIGAGLAKACIAGRVNGELVDACELIETDSTLAIITSKNEEGLEIIRHSCAHLLGHAIKQLWPDTKMAIGPVIDNGFYYDIDLDRSLTQEDIELLEKRMMELAKKDYDVIKKRVTWQEARDAFAARGEEYKIQILDENISRDDQPGLYHHEEYVDMYRGPHVPNMRFCHYFELQKGAFRAH

SEQ ID NO: 5813 - protein, 649 aa, Xenorhabdus sp.
VNSGNGMKNKRTPFRDYTAESALFIRRALVAFVGVILLTGVLIANLYNLQITRHEDYQTRSNGNRIKLVPIAPSRGLIYDRNGILLAANRTIYQLEIVPQKVDDLDKTLNELRSIVGLTDEDIENFQKERRRARRFTSIPLKTPLTQVQVARFSVNQYRFPGLEIRGYQRRYYPYGSALTHVIGYVSKINDKDVERLDQEGILPDYAATHDIGKLGIERYYESILHGKPGYEEVEVNNRGKVIRQLHEQPPQAGKDIYLSIDLELQTYIEKILTTSRAAVVVTDPRTGEVLAMVSTPSYDPNLFVDGISSKDYKALLNNPDRPLINRATQGAYPPASTVKPFISVAALSSGVITKNTTIHDTGRWQLPNSNMSYRDWKRYGHGLLNVHKAIVESADTFFYQLAYNMGIDKISEWMTKFGYGQFTGIDLKEETAGNMPTREWKQKRYKKPWYQGDTISVGIGQGYWTATPMQMVKALMILINDGEVKTPHFLLRTHLNNSVHPYQPPVIEPIGDIHSGYWEIAKEGMYGVANAPNGTARRFFAGTPYKAAGKTGTAQVFRYETYNASKLAEHLRDHWLMIAFAPYDNPTVAISIILENGGAERKPIGAIVRQILDHMLIKSDKDPSPTEPADKNRSLPAGKPASGTRINE

SEQ ID NO: 5814 - protein, 370 aa, Xenorhabdus sp.
MTESQKKVPFWNRIHIDTPLLLCILLLLAYSLFIMWSASGQDAGMMERKVGQVLIGLVVMVALAQVPPRIYESWAPYLYIVCVILLILVDVFGQISKGAQRWLDLGIVRFQPSEIAKIAVPLMVARFMNRDLCPPSLKNTGIALILIFLPTLLVAAQPDLGTSILIAASGLFILFLAGMNWRLIAIAVVLAACFLPILWFFLMHDYQRARVMMLLDPESDPLGKGYHIIQSKIAIGSGGLFGKGWLQGTQSQLEFLPERHTDFIFAVLAEELGLVGVIVLLALYLLIIIRGLIIAAKAQNTFGRVMVGGLILILFVYVFVNIGMVSGILPVVGVPLPLVSYGGSALIVLMAGFGIIMSIHTHRKLLSKSL

SEQ ID NO: 5815 - protein, 338 aa, Xenorhabdus sp.
MRQQWLILGIVAVLISGCTTKNEKGATSVLPIPTRDVLGAEPVYEPYHPSANQDYTKDGVNYHIVKDPAQFTQTGYASVFGEESTGKLTAIGERDTPYALTAAHPTLPIPGYVRVTNLSNGRMIIVRVNDRGPYNKPGKIIELSRAVADRLNLMPQSKVKLDGVQVTPDGSLAGLGTEGSTIVKQSYALPDRPALNSSASVTGMDSGLSEQTPPEQNPSSNTVSIDSQSVSQPDKPASVQETVQEPPAQTKSVVTSSVTPESANVSGFMVQVGAVSTEAKGREWQQSLSKRFNTPGRVIQFGHVYRVQLGPFNARQQAVELQKKLTDQMQQSSFITTP

SEQ ID NO: 5816 - protein, 87 aa, Xenorhabdus sp.
MKTKLNELLEFPCSFTYKVMGLAQPELVDHVVEVVQRHAPGDYSPDVKPSSKGNYHSVSITINATHIEQVETLYEELGALELVRVVL

SEQ ID NO: 5817 - protein, 209 aa, Xenorhabdus sp.
HNTVILRQLGIQPYEPVSEAMHQFTEQRTAETTDEIWFVQHEKVFTQGQAGKAEHIIAAGDIPVIQSDRGGQITYHGPGQQVMYILIDLKRAKLGVRQLVTAIENTVVETLAHFGVESYARADAPGVYVNGSKICSLGLRIRKGCSFHGLALNIAMDLQPFLRINPCGYAGMQMTQLSDLVTGITVEDVQPVLAQKFCQILGFQLTDER

SEQ ID NO: 5818 - protein, 53 aa, Xenorhabdus sp.
MSKPIQMERGVKYRDADKMALIPVKTVVTEREALLRKPEWMKIKLPADSSRIL

SEQ ID NO: 5819 - protein, 459 aa, Xenorhabdus sp.
PTFVALIYKEKSVFAFLETFIIGLIFGGVGWYFTRKTKIQPSTQDGFLIIVLFWLLFSLLSALPFVLDKSLNINLVDAMFEGVSGITTTGATVLNDVSTLPKSVLYYRAQLNFIGGLGVIVLAVAILPLLGIGGVKLYQSEMPGPFKEERLTPRLADSAKSLWVVYLLLGGLCSFSFWAAGMSWFDAICHGISTVSLGGFSTRNESLGYYDNSLIEMVGGVFSILSAVNFTLYFVILTRRSLKPLLKNAEFKFFLLVLFIVVCIIWLELYRSGMYGLKDSFVHGFFMTSSMMTDNGLSTSDYAQWPPHTMLMLLAVSFFGGCVGSTCGGIKALRFLILTKQSFSEINQLIHPNAISTIKVGQAPVQERVLRSVWGFFFLYVFCSCFFIWALNLLGYDLVTSFATVAACINNMGVGYGDTVQGFGNLSAVAKWMMCAAMLLGRLEIYPILILCSKAFWRF

SEQ ID NO: 5820 - protein, 145 aa, Xenorhabdus sp.
KNSGHGRRECLHVMQIQAALHEEFQQQWPSIQSVIEVVSERSTKGQPAHLDSRWYVSSLPLDAETAAKAIRRHWAVENELHWVLDVAFREDNISLKDPDGAAQMALFNRIALNVIKQNTSIKDSQAAKRRRATWSGEFRSQLIFD

SEQ ID NO: 5821 - protein, 85 aa, Xenorhabdus sp.
MSDVSYEEPTQKLTCAAITKEYFEKAAGNNTDTLLEVFFEDCVWSRALAYARGLQLSHMLGVSSAIRLNLVSETGDASQGDITIA

SEQ ID NO: 5822 - protein, 395 aa, Xenorhabdus sp.
WNIMQTLSKLIYLDNNATTALDPEVLQSMMPYLTNEYGNASSISHAFGWKARKSVEHARKLISSSINAVSPSDIIFTSGSTESINLAITTLQHKSKKGHVITSMIEHKAVLDCCAKLESMGIDVTYVQPQSDGVVSPASIHSALRDDTYLVSIISANNEIGSLQKIEEIGAICKERDIIFHTDATQALGKIEFDVQRLNISLASFSAHKIYGPKGIGALYINSRDKNIVLSPLIVGGGHERGLRSGTLNVPGIVGFGRAVELSVKNLPDESQRLGHLRNILRQYLIENVDGIRINGHLTACLPGLLNVTFEGIDADSLLLELSDIALSSGSACTSANRASSHVLKAIGVSNEQAQASVRFGLGRFNNEEEIDYVCYKLKEAINKLRSMVPRAFSS

SEQ ID NO: 5823 - protein, 375 aa, Xenorhabdus sp.
RQLQTFGIFAAGYLARPLGGIIMAHFGDLAGRKKMFSLSILLMALPTLIIGMLPTYTTIGIIAPLLLLVMRIMQGAAIGGEVPGAWVFVAEHVPRKHIGFACGILTAGLTLGILLGSLVATAITSVYSKQEVLDWAWRLPFFLGGLFGLCAMYLRRWLHETPIFKEMQARKALSDGLPLKSVIQNHKRAITVSMLLTWLLSAGIVVVILMTPTYMQTVFHLEQSMTLKANSLAIVSLFISCVLVGHFCDKWGASKVLLAGSLLLGAAAWFFYHNISHDPIRLYSAYAIVGFSVGVIGAVPFIMVHSYPPEVRFSGISFSYNLAYAIFGGLTPIIITLLMQYTQLAPAYYMLMLSAIGVLLGLYLSRKTISGNQAI

SEQ ID NO: 5824 - protein, 55 aa, Xenorhabdus sp.
VYGLPESHAVGKFSAYAVEYFEIAASRSDARKSFPALEVLNEINQVVVQSHDEFS

SEQ ID NO: 5825 - protein, 106 aa, Xenorhabdus sp.
MKKTGVILWLSLLFSSFAMSMTLDEAKQQGLVGETFSGYLAPVRNTEDALSVVKQINSEREKRYAEIAAQNNITTDQVARIAGEKLVSRAGAGEYVRGINGNWLKK

SEQ ID NO: 5826 - protein, 1301 aa, Xenorhabdus sp.
VELPLTATIAELYAELEYTPLRDQFRLRKRLQGAAKIKNQASLQAVAQSIAADITTAKQKVINRQTACPTIKYPENLPVSQKKDDIYKAIRDNQVVIIAGETGSGKTTQIPKICLELGRGVKGLIGHTQPRRLAARSVASRIADELETSLGSAVGYKVRFNDQVSENTLVKLMTDGILLAELQQDRLLLQYDTLIIDEAHERSLNIDFIMGYLRQLLPKRPDLKVIITSATIDPERFSRHFSNAPIIEVSGRTYPVEVRYRPIAGDDNDNDRDQLEAIIDAVEELGRESAGDILVFMSGEREIRDTADALSKQNFKHTEILPLFARLSNNEQNRIFQSHVGRRIILATNVAETSLTVPGIKYVIDTGYARISRYSYRTKVQRLPIEPISQASANQRKGRCGRVSDGICIRLYSEDDYLSRPEFTDPEILRTNLASVILQMTSIGLGDVSAFPFVEAPDKRNIQDGVRLLEELGAIDTESSTDGTYQLTQMGRQLAQLPIDPRLARMVLEARTHGCVREVMVITAALSIQDPRERPLEKQQASDEKHRRFADKDSDFIAFLKLWDFLTEQQKELSSSQFRKLCRQDYLNYLRVREWQDVYTQLRQVVKEIGIPVNSQEADYRSIHIALLTGLLSHIGQKDVEKQEYTGARNARFSIFPGSGLFKKPPKWGMVAELVETSRLWGRIAARIEPEWIEPLASHLIKRHYSEPHWQKSQGAVMASEKVTLYGLPIVMGRLVNYSQIDPMLCRELFIRHALVEGDWQTRHSFFRANLKLREEVEELEHKSRRRDILVDDETLFSFYDQRIGKDVVSSRHFDRWWKTVSKDQPELLNFEKSMLIKGDANKVSALDYPNYWYQDNLKFRLTYQFEPGTDADGVTVHIPLPVLNQVRDEGFDWQIPGIRHELVVALIKSLPKPLRRNFVPAPNYAEAFLERVTQPQATLLESLEKEFRRMTGVTLSRDDWQLEQVPDHLKMTFRIIGEKNKTLAEGKDLSALKLKLKDKVQETLSAVADDGIEQSGLHIWSFGELPERYEQKRGGYSVKAFPALVDEKDSIGIKLFETESEQLNAMWEGTRRLLLLNIPSPIKYLHEKLPNKSKLGLYFNPYGKVLDLIDDCISCGVDKLIAENGGPAWNEQAFSDLQDKVRADLNDAVVDIAKQVEQILTTVFAINKRLKGRVDISLALALSDIKAQISGLVFRGFVTAHGWKRLADVLRYLNGIERRLEKLAIDINRDRTHMSRIEYIQQQWQQWLAKLSVQQKQLPEVKEIRWMIEELRISLFAQQLGTAYPISDKRILQAMENIAA

SEQ ID NO: 5827 - protein, 58 aa, Xenorhabdus sp.
VGLGSRNNKEVIYDSVKDNINFSYLVGTKQSGVVATLSSNDPFSPVNAVLGRCKRVGY

SEQ ID NO: 5828 - protein, 394 aa, Xenorhabdus sp.
MKTHREIAQQLDLFHSEPQGPGMIFWHPNGWRLFQNIQQHMRKIYQQHGFQEVRTPQFLKKELWQTSGHLAMYEEDMFFGGGQDGISDYALKPMSCPAHILLFKRGVHSYKELPIKLFEFGLVHRNEPSGALNGCLRLRQFTQDDAHVFCAWSQIQVEVINFLNRAKLVYSQYGYHQLLVRISTRPESALGDKLLWQKAEQILIDVCQEQSVDFEIQIGEGAFYGPKIELALKDNIGREWQCGTIQLDFNLPERFDIAYTNSSGEKERPVILHQVIYGSIERWIGVLLESTQGALPEWIHPLPVAIATVSEAAIDYANALVCSLNSADLPVLADHSNSSVAHKIRRFHQLKIPNILIIGEQEMKTAQVALRRGKVISIVGKEQLVEQLMVNRNR

SEQ ID NO: 5829 - protein, 212 aa, Xenorhabdus sp.
MSNLLVLKSSIMAQNSQSNKMADNFIEQWSTSHADSHITIRNLAEGPVPVLDGELLGAMRPSGAELTERQKTAMALSDELIAELKAHDVIVITAPMYNFSIPTQLKNYFDLIARAGITFCYTESGPEGLLKGKRVIVLTTRGGIYQQTPKDLITPHLQIFLEFIGITDVKFVFAEGIALGKELAHQAHQNSHNAIIEIIEKIKQEQSEEIAA

SEQ ID NO: 5830 - protein, 176 aa, Xenorhabdus sp.
KIPAMAIRIVFYLSPLPANHGYARLRAALYEYNRIFKSTHVLNLIDDMHLRKAIRTARNRTESYHQLQSIIRKIYNNVFKGRKITDNRVSAHAARLVANCIVAYNAMILNRVYKKMVFEGVPEEILEKFARISPIAWQHLFFTGRYSFKKASKTSIDVAALAELLEQHLKQAFWKS

SEQ ID NO: 5831 - protein, 32 aa, Xenorhabdus sp.
MSEQFSQKYEGLMDYGAGLGQEIWTPIRALID

SEQ ID NO: 5832 - protein, 169 aa, Xenorhabdus sp.
MTPAIFVTTKKRFAQDPGHGRWFDLLDYTDEDDFLENVKTFYGELDEDDSYFFPDWTDIPKEALKKEGHVNWEYIDVLSELSGDSQDAYYEYCTNLLYIVDRETFKGAYITTLTLYESECDFIIQYASNILENESIPEICRLYFDWDAYTRDRFIDTYTRYGQHIFYQI

SEQ ID NO: 5833 - protein, 53 aa, Xenorhabdus sp.
MTLKEIENAPEQHWYAFRVNMIDYHIWVFGQNVTSEHSAQNVRNSITTQLTTV

SEQ ID NO: 5834 - protein, 109 aa, Xenorhabdus sp.
MPELQFETRTSAVVSTAHLSQSDIELLTQYSQNAPDEGDIVVRIHKEGVEICLATDAHLACMENIADTLDLSDGFLNNLQRVKETLPDLYSIMFDQDAFLVSGLVEFEW

SEQ ID NO: 5835 - protein, 120 aa, Xenorhabdus sp.
VDINDNISHSDIATWWMLNEEALPTKEAIEECYLLIELRTECDMGEAWCEERRVIRDDYFDDYCIEELYELGYLTYRNGNNKNPAWLEQFIDKEKLINAIQYDYKSITLSNGDEYWVYNQ

SEQ ID NO: 5836 - protein, 87 aa, Xenorhabdus sp.
VASSDEINLYDTYSRYLEQIDAPTEKSKNIRLRWLIYFTVINKPSVYSNYYKNGQRGFNGVLHSYLNDDHIDIALKKIVTELNFEPI

SEQ ID NO: 5837 - protein, 121 aa, Xenorhabdus sp.
FGHLTDPRLNRTKQHLLIDILTISICAVICGCESFNAIEEYGKSKEDWFRQFLELPNGIPSHDTFNDVINRLNPQEFGEAFIAWVNKLAKISTDIIALDGKTMRGTLDKANGSPVSFRARG

SEQ ID NO: 5838 - protein, 323 aa, Xenorhabdus sp.
GLTKKLIELGYPGVVAVDFKEAYSLSQHGIPLCHIGHLVQTPAHLIETMLRCEPKIITVFSLEKAQAISDAAEKLGRIQPIMLKVFAKRDMAFTCQESGFLFEELDSAIDALKQMPGIKLCGLTHFPCLAWHAQYQTTLPTVNLQTLIRARNKLRQRGISLTQINAPSATSCSTIPLLSKYGATHLEPGHALTGTIPANSIGREPEQIAMAYVTEISHHYEDKSYCYGGGYYQRSHMKHALVFPEHNSSYKTARILRLGEPCIDYHLSLYGLHPIGSPVIMCFRTQIFVTRSDVALISGIQSGNPKLEGIYDSQGNWKNNGYS

SEQ ID NO: 5839 - protein, 316 aa, Xenorhabdus sp.
MECQKNLRNTPIHSALYSPPKIDTSGYTYVHEHLHIDLSEAKGTLDCRLDQYELIVDELRHLHALGLRNIVEVTNRYMGRNASFLLNLVCDTHINIIASTGYYKRPFFPAHFSTLSIQDIAEEMITEIETGIDGTELKAGIIAEIGSSLEVITEDEQKVFAAAALAHHATGCPISTHTTLSTMGREQLALLKGFGVSPESVAIGHCDLKDNLDTIIPLLEEGAWVQFDTIGKNNYYPDSGRIAMLQALARRGLLDRVMLSQDITRRSHLKSNGGIGFDYLLTVFVPMLLTAGFTQTQIDRMLRDNPAQFFRHRYSK

SEQ ID NO: 5840 - protein, 128 aa, Xenorhabdus sp.
NKKERDNNMKFVVGGQIEKEKIAECIRQLAGDKAASVVIMNDIEASMAIKNGDADYYFGACNTGGGGALAIAIALIGLDLCATIGMPGKILSDDEIIAHVKAGKKAFGFTGQDIDIVLPVIINTIISQ

SEQ ID NO: 5841 - protein, 456 aa, Xenorhabdus sp.
MQHFHEFLMRLMEVDPFKAGLLASIGAIAAMMANRGIAVFHDGLRPLLPEYLEGRMSRKALAATSFALSIGLVVGFGIPFSLTAPIVLVHSLLLGTDMIGIWCANSRRGFVASGIIGALYAIALLAGLRSVVELFAMLPVNFTDDLKKVGDPIVACFALFPAMVVGYQYGYRKGLLVMLTALAGYVATKAAGPLSFGGLIEKPVSVDPNGAALLLSMIAMFYFAMRERPNNAPSANQSSAAPKGANEMLVGLFSTRIERIQKNKWLLILCGGLTASAATMSFSLLAEGPVSLQLMAQDEQTSALLVALARAIGFVPLVGTTAIATGVYSPNGMKFVFVAGLATSNPWLAFVAGGLTMFIEIQLLAKIAIWLDKYPGVKACSGHIRTAITKMLEVALLVGGMIASNAILPGMGFMIVAGIYLLNRTSKRPLVEMAIGPIATIAVGILANVLYLVGIN

SEQ ID NO: 5842 - protein, 364 aa, Xenorhabdus sp.
MKTAPLQSMTMAQAQKQQFKLVDIICRHFPGADFLSQGDLGLVPGLQQPRMTYRIESVLAEYFNAEAAAFVNGAGTGALRAGLGAILRPCETLLVHDAPIYPTTKTSIEQMGLNVVYADFNCTKQLETAIQQHKPTACLIQHTRQKIDDRYSLKEIISILNKHHIPSLVDDNYAAMKVPHIGCEYGATLSAFSCFKLLGPQGVGLVIGKQTIIDKLRQNMYSGGCQIQGYQAMEALRGLVFAPVMHAVQSEVNEELVFRLNQGEIPQVKQAIIANAQSKVVLVEFHEPIADAVLNTAHTLGALPYPVGAESKFEIPPLFYRISGTFRQTDPTLEKRMIRINPNRSGAETIMRILQASCRKQTSG

SEQ ID NO: 5843 - protein, 462 aa, Xenorhabdus sp.
MEEPIREASLAAVKTASDIAYQYVSEIRNQRVYPDSDALLGLQNFDRPLPQNGTDCQEVLAQLHKYGSPATVASTGGRYFGLVVGGSTPAAMGANIVTSAWDQIALMESSSPVAHQLEKIAGRWVLELLNLPSDAFVGFVSGTTMAHVSALGAARQYLFQKQGYDLAEQGLHNAPPLKVVLSEETHVSVLKALKLLGFGRSQFIFVPCDNQGRIIASAVPELSDNMILVLQAGNVNSGSSDPFQSLIPQAKKAGCWVHVDGAFGLWARASKEKSELAGGVEGADSWAVDAHKWLNTPYDCGMCIVRNKQALRDVMTTSAAYVETQEVWQAKDMLPEFSRKARAVEVWAAISELGVQGIEALIDRCCLYAEMLADGLKSLGFTILNDVVLNQVVACLPDITLQRRMLQLVQQSGECWFGQTTWQGQEAIRLSVSSWATTEADIQRSLKAIAAAIDEANKDINK

SEQ ID NO: 5844 - protein, 417 aa, Xenorhabdus sp.
MESKVVVPAEGKKITIDTKGKLNVPNNPVIPYIEGDGIGVDVTPVMLKVVDAAVQKAYSGERKISWMEIYTGEKSTQVYGKDVWLPEETLDLIREYRVAIKGPLTTPVGGGIRSLNVALRQQLDLYVCLRPVRYYQGTPSPVKHPELTDMVIFRENAEDIYAGIEWKAGSAEADKVIKFLQDEMGVSKIRFPQQCGIGVKPCSEEGTKRLVRSAIEYAIDNDRESVTLVHKGNIMKFTEGAFKDWGYELARTEFGGELLDGGPWVKIKNPKTGKDIIIKDVIADAFLQQILLRPAEYDVIACMNLNGDYISDALAAQVGGIGIAPGANIGDECALFEATHGTAPKYAGQDKVNPGSVILSAEMMLRHMGWFEAADLIVKGMEGSIAAKTVTYDFERLMEDAKLLKCSEFGDAIISHM

SEQ ID NO: 5845 - protein, 341 aa, Xenorhabdus sp.
MRALGATRGNESDQLRWGYNTPEFYKTLSTYEKTMLDFGLMTDGYKDKYQKWHEKKGAEKPQSPTLPDNQKHYQDIYQIPNDPNRVNKSDKQPRGIRNNNPGNLIAAPNAVGEDFGNGHRYVKFGTAQDGISAMGRQIMLDAERGLNTITSLLYRYAPPEGRNNTPAYIDSVSQRTGYSPDQPLDLHNPDILKNVMVGMIQHENNNINPYSDEQMQAGINAAIHDARWSGLRNPQRLKKQRAQYGPNNVITDGIDGVNDKNVQTQKSQPPDKKIPSLYNKKDYEPTKLGVEMAEGMAKAVRDAFGDLPLKLEVILVNDKTGERQRFQSKLGGKVTTSMQQP

SEQ ID NO: 5846 - protein, 200 aa, Xenorhabdus sp.
VASSASFDCAKATSKTEKLICATPILSQADDALLVAYTHAKIATGNSDGFKALVRQNWNLREKNCDTVKCLQDWYRQSSEIYHRIAATREEGEKVNSTYFYNTSAKFKGTLNSESEGFPSLRLDHLISVSPSDGVYDETEPFEHGVAVMQLAMTKKEQWNIFEKLIGKKVSVTCNIYHAHTIHHKTPIMCLVEKIEKTKS

SEQ ID NO: 5847 - protein, 193 aa, Xenorhabdus sp.
MDVKNLYRRAMMMLGLGRVTTCNDKGVIQQIQYQTEMEVRDNTHRIAEFGFSSGLPANTDVVLAFLGGDRSNAVVIGSNHQQYRHQGLNPGEVVVYNQWGLHILLTESEITVEAKGQPVTVNNASKVTVNASTEVLLNTPVLKVTGNVIDNCNTNTTTMKQLRESYNRHTHPVSGVRAGDSTVQSQITGETVK

SEQ ID NO: 5848 - protein, 96 aa, Xenorhabdus sp.
MTNFSFKKRKLNRFSQRKNTNATKRIAGPRRVLIFNKPYDVLPQFTDEMGRTTLKNFIPFSDVYAAGRLDRDSEGLLVLTNDGKLQAKLTQPNENL

SEQ ID NO: 5849 - protein, 305 aa, Xenorhabdus sp.
MMQDLRLILIVVGAIAIIALLLHGLWTSRKERSSLFRDRPVKRRKQEREKESEDNDGDELFNNPSNSPVHESAKSRREHREEPVIERNAPDLSDVTSDNGIDPLLSKQQPEAPVAKENAIDESQKESQLGLFESAEQNGTEGKETEAGNQHIQLENAAKAEAEQAKKETVLVLHVAAHHGQELNGEVLLQSILQSGFRFGDMNIFHRHLNPSGSGAVLFSLANMVKPGSFDPERMTDFSTPGISMFMLVPSYGDSNQNFKLMLQAAQRIASDVGGVVLDAERKILTPQMIENYKARIRNTLSAQE

SEQ ID NO: 5850 - protein, 677 aa, Xenorhabdus sp.
MKNIIQKINELRTTLRHHEYLYHVMDAPEIPDAEYDRLMRELKSLEEQHPELITADSPTQRVGAAPLTAFEQVRHEIPMLSLDNVFDQESYLAFDKRVRDRLKDSRELVFCCELKLDGLAVSLLYENGELVRAATRGDGTTGENITANVRTIRAIPLRLKGDNIPARVEIRGEVFMKQAGFEKLNEEARRTGNKVFANPRNAAAGSLRQLDPRITAKRPLTFYCYGVGVIEGGDSENGQLPASHYGRLMQFRQWGLPVSDKVKLCQGTQQVLDFYREIEQQRPELGFDIDGVVIKVDSLELQEALGFVARAPRWATAFKFPAQEQITIVRDVEFQVGRTGAITPVARLEPVQVAGVIVSNATLHNADEIERLGLRIGDTVVIRRAGDVIPQVVGVIQEKRPTQSQEVVFPEHCPVCGSDIERVEGEAVARCTGGLFCGAQRKEALRHFVSRRAMDVDGMGEKIIEQLVDKEYVKTPADLFRLTAGKLTGLERMGPKSAQNVVNALEKSKKTTFARFIYSLGIREVGEATAANLVAHFGTLGKLCVADTQALIAVQDVGEVVASHVVNFFNEPHNQAVIDDLVNNIGIHWESAEVPQAADIDSPFAGKTVVLTGSLSRLSRDEAKDKLAALGAKVTGSVSKKTDLVIAGEAAGSKLAKATELGIAVIDEEEMLRLLGE

SEQ ID NO: 5851 - protein, 396 aa, Xenorhabdus sp.
MSHIFHFVLALVLIGGLAILASNNRKDIRVRYIIQLLVIELVLAWFFLNSNAGLGIVKGFDNLFVHLLSYAAEGTNFVFGGMIDAKLAFFFLNVLCPIIFISALIGILQHIKILPIVIRAIGTVLSKVNGMGKLESFNAVSSLILGQSENFIAYKDVLDKMSERRMYTMAATAMSTVSMSIVGAYMTMLDAKYVVAALILNMFSTFIVLSLINPYSVKSEGDIHMSNLHEGQSFFEMLGEYILAGFKVALIVSAMLIGFIALIAAINAVFDMVFGITFQECLGYVFYPFAWIIGIPADEALKVGSIMATKLVSNEFVAMQGLQEIAGQLSERSKGILSVFLVSFANFSSIGIVAGAIKGLNEKQGNTVARFGLKLLFGSTLVSFLSAAITGLVMSF

SEQ ID NO: 5852 - protein, 71 aa, Xenorhabdus sp.
MDKENLLEIANTVMPFGKYKGRMLIDLPEEYLLWFARKGEFPQGKLGTLMEMTLAIKIEGLDSLVKPLKKS

SEQ ID NO: 5853 - protein, 426 aa, Xenorhabdus sp.
MNIDNNIVFSEKKEELSPITVSIPDGADVIVGQHIYLVVTVKSPQVKSIKSISIEDPQKNISVLKIVEDWRLIDDTSGEAMFMLEVDDQLSPNKTVSYTVHAYSDKNEDVHGIEPLMINYKTKKINEWNFVSLKTDIEIIEIPVGSTYNPNGKYILYSGKVIDENNNPLKNTQIIVSSANYPGGELEMLYITTDPSSGKSPEIVEIQKREKFSNFFVINSDENGNVGFRIYPKRLTLRIEFIVEILGMNFAIPIGFAYVISASDSNPSVPPPQIIGILPGGIIKKETEVKDLILTVPKYSYPAGGDVIIFLIKDENNKLIQLSPTYFVKDNSKEGNYNARISYEKIPFNKKLVFYYLVIRLGGDSMYSKRLNVIFEDDSGAGTNPNNGGNTGNGNHCDNGLYNKVDVDSNYEDGKFSLKIKSITLI

SEQ ID NO: 5854 - protein, 317 aa, Xenorhabdus sp.
MSKIYEDNSLTIGHTPLVRLKNFGNGRILAKIESRNPSFSVKCRIGANMIWDAEKRGILTKDKELIEPTSGNTGIALAYVAAARGYKLTLTMPETMSLERRKLLKALGAKLVLTEGAKGMKGAIDKANEIRDSAPERYVLLQQFSNPANPEIHEKTTGPEIWEDTDGNVDVFVAGVGTGGTITGVARYLKNTQGKQVKIVAVEPEDSPVISQKLAGEELKPGPHKIQGIGAGFIPDNLDLTLVDRVFKISNEEAIKTAREVTEKEGILSGISSGAAVAAAIKLSQEDEYKNKNIVVILPSSAERYLSTALFADLAND

SEQ ID NO: 5855 - protein, 255 aa, Xenorhabdus sp.
MTNSTKLPKHLGGFHYIVQGWHLVTRPGIKRFVLLPLLANILLIGGAFWWLYQKMDGWIQWALDKVPDWMQWLSYLIWPLAVISVLLIFTYFFSTLANFIASPFNGLLAEKLEAQLTGIPAPDTGIFDLLKDVPRILKREIVKILYYLPRAIALLLLYFIPGVGQTVAPVLWFIFSAWMLAIQYCDYPFDNHKVSFIGMRNTLRQDKIDNLQFGAAVSILTMIPVINLFIMPVAVCGATAMWVDRYRAQHVLRNR

SEQ ID NO: 5856 - protein, 429 aa, Xenorhabdus sp.
DIKYLFLLSTPIIVTQLTRIAMSAVDVIVSSHYSTNALAAVSLRSSIWFPIFVLGFGVILMLSADVAKLRANNDIEGIKDCVNNYISAALILSIPIVAFLLLAVQLLSLIGIDEDVVHITKDYITAMAFGVPGVMIFNVFRSLLQAFENTKVAMYISIFALIVNIPLNYIFVFGKFGVPEMGGVGAGITTAIINTLSAILLIIYFLRKKEYEKYRFKLSLKLNSGLKRLFLIGIPSGLALFVEVIFIDAISLGIATLGTVYIAANNIIIIISSMIITIGGGLSAVTTVKISYLSAKKDYSSTLRFSLLSLISTTFITLVLGIMFFLYAEHIISLYTKDTLVINIALGVIIFLFFFQLFDSIHSILSGVLRGFHETKIVFYVPLFGYWFIGVPLAFTLGLTNLVTEKMGLIGFWYGLVFGLLINCITLSM

SEQ ID NO: 5857 - protein, 850 aa, Xenorhabdus sp.
SPAKDVSTHTPMMQQYLRLKAQHPDILLLYRMGDFYELFYDDAKKAAKLLDISLTKRGQSAGQPIPMAGVPYHAIENYLAKLVQLGESAAICEQVGDPATSKGPVERKVVRIVTPGTVTDEALLQERQDNLLAAIWHDSQGFGYATLDITSGRFRVSEMADEDTIAAELQRTRPAELLYPEAFEHMGLIERYHGLRRRPMWEFELDTAKQQLNLQFGTRDLIGFGVEKAPQALRAAGCLLQYVKDTQRTALPHIRNITMESQQETVIMDAATRRNLELTQNLSGSTENTLASVLDQCVTPMGSRMLKRWLHTPIRNRDILENRQQAISALQEIGFELQPFLRQVGDLERVLARLALRSARPRDLTRMRHAFQQLPDIHQIMDSSDSPYIQALQQRIGRFDELQQLLENAVVETPPVLVRDGGVIAPGYNAELDEWRALADGASDYLDKLEIREREKLGIDTLKVGFNAVHGYYIQVSRGQSHLVPIHYVRRQTLKNAERYIIPELKEYEDKVLTSKGKALAIEKALYEELFDLLLPHLAALQTSAEALSELDVLANLAERAETLNYTCPTLTDRTGIQITGGRHPVVEQVLSEPFISNPLTLSSQRRLLIITGPNMGGKSTYMRQAALITLLAYIGSFVPAEKAVIGPVDRIFTRVGASDDLASGRSTFMVEMTETANILHNATEHSLVLMDEIGRGTSTYDGLSLAWACAENLANRIKAMTLFATHYFELTTLPEKLEGVVNIHLDAVEHGDTIAFMHNVQDGAASKSYGLAVASLAGVPRDVIKRARQKLKELESLSNNATAGHVDTPQLTLLAEETSPAVEALENLNPDSLTPRQALEWIYRLKDMV

SEQ ID NO: 5858 - protein, 264 aa, Xenorhabdus sp.
MTGTRTTGLSIKGDTSLLEPIYQFLQCETPDQWVEKARQPENLPVLLRDHLLCELKAAQSAMFLIRKYAVDPASADALLAWFQPYEDFAYKKIGSIHSLKGKSQITKQITAREKSPYSQSLIDKMVLLIKEELHHFYQVLEIMESRGISYDSISASRYARSLFQHITNHEPYTLVDKLIIGAYIEARSCERFAKLAPYFDEELGKFYISLLRSEARHYQDYLTLAQSISKNDITERVKYFGQIEAELIQSPDSDFKFHSGIPVN

SEQ ID NO: 5859 - protein, 329 aa, Xenorhabdus sp.
MNKINVTSYTAQYRFKPEGNYLVDLKANAFYSQAVSHINSSSPLSGITVDRTYSQTDKWGVGINNTSEILFPYGDLLFTYGASYTYETTGYPKNETYDVLKSGSFREGWRNDYNIFANAEWKPLDWLTFDGGLRYSYFKSHDNNPIFPKFDYVDGKMIPLSHKVTYGEGLERTAGGWSPIINMTLEPLEGLQFYGKYGSAIRLPSLFETTKGWSQTPNTNLLLSPERSLSWEVGVNVLKNDLLMDGDKFRTKLSYFDTQVKDYLTRINNAKRGQYETQLTMINVDKAEWRGLELSSSYDVGVAYAELGWSYYTHTLFCLTPEQASINPK

SEQ ID NO: 5860 - protein, 300 aa, Xenorhabdus sp.
MTPGSSTHISAEQVEQRRGTSVGDFLKGTPGVLNSENRNSGALDVNIRGMQGQGRTPVIVDGAMQETTIYRGYSGVAGRTYIDPDLISSVDIEKGPSTGADANGAIGGVVRVSTLNVNDVVLHGQTFGVRMTGGFNNNSTRPPEVGTIGGYPKSDVYKNDEIYKAYGKPAGMERHGGFRPTGGNGSIALGIKSEYLDMVAAFARRHNGNYYAGKRGENVPQITITPSSNGKSFATSERFTPYRASEEILNTSMDNISYLLKGKLKFEGHGLELARNEYISRYGEIMPSAIARFGAPYEGL

SEQ ID NO: 5861 - protein, 331 aa, Xenorhabdus sp.
MSQSTLKVNELYEEADLDENGTEADDFDEALLKDEDDLTSFDEDLELLQGVNQRVLDATQLYLGEIGFSPLLTAEEEVLFARRALRGDIAARQRMIESNLRLVVKISRRYSNRGLALLDLIEEGNLGLIRAVEKFDPERGFRFSTYATWWIRQTIERAIMNQTRTIRLPIHIVKELNVYLRTARELAHKLDHEPSVEEIAEKLDKPVDDVSRMMRLNERITSVDTPISGDSDKALLDILSDENDSGPETTIQDDDMKQSIVKWLFELNAKQREVLARRFGLLGYEAETLEDVGREIGLTRERVRQIQVEGLRRLRDILHTQGLNIESLFRT

SEQ ID NO: 5862 - protein, 265 aa, Xenorhabdus sp.
LQDGKIVYNRNYGSIPKGSYNGKTYTVKHGDTLFYIAWITGKDFRELSHINGISEPYGLNVGQVLRIGNVNSRNGVLIASNSTQSKIEQVDFQKGNAYPANNDRHNSQKMLPRETISDSDDAPSKGSSATDLNASKAITSKIINSWRWPAEGKVLESFSDSQGGNKGIDIAGNRGQPVFATASGKVVYAGNALRGYGNLIIIKHDDDYLSAYAHNDTMLVREQQDVQAGQKIATMGSTGTSSVRLHFEIRYKGKSVNPLRYLPQR

SEQ ID NO: 5863 - protein, 116 aa, Xenorhabdus sp.
FEAVLDRSNTRRDIYADKGYASQKRERVLKEQGYRVHIQRKAARNKPLSHCQKGRNKKIAKTRARVEHIFGSLSQMGEKIIRTIGQLRANFAMTMKATCYDLQRLVYFGKSGIHAF

SEQ ID NO: 5864 - protein, 269 aa, Xenorhabdus sp.
MLETRALSFSYQDDPVLKDLTLDFSRFQVTGIIGANGCGKSTLFMNLSGILRPQKGAVWWNNTPLDYSKKGLMALRQRVVTVFQDPDQQIFYTDINSDLAFSLRNLGVDETEIQRRIEYALTQVDAHTFRNKPIQYLSFGQKKRVAIAGALVMDADYLLLDEPTAGLDPAGRQQMLDIIHTIAAEGKRIIISSHDIDLIYQICDGLYVLANGEMISSGSTETVFLQKTQLELAGLVQPWLVKVHTEGGLSLCKTEQQLFSMLRKNIPHH

SEQ ID NO: 5865 - protein, 230 aa, Xenorhabdus sp.
MIGIDKLSYQSRWRDKDPRAKFALYLLFMTLAMVLSPLWQAVLLVGLVMFSCYLLRISLLRYLKWMLIPCSFLVFGLIAIVLSIGIQPEKLLWGFRIGQYWLGIDMQGIQIANQTLWRSLAALSATFWFMMNMPFEQIIRLLKFCRVPHLLIEQLLLTWRFIFIFVEEAAAIHHAQSLRFGYRTLRTSYHSLAMLISMLFVRVMNRYQQMSVALELKLYQGNFHLTIGKP

SEQ ID NO: 5866 - protein, 94 aa, Xenorhabdus sp.
MKKTLILLSLVAALCIIPFFIEHGGEFGGADGQAEAQIMEIAPDYTPWFESLYEPASGEIESLLFTLQGSLGTAVIFYIFGYYHRNRKDHDRNR

SEQ ID NO: 5867 - protein, 245 aa, Xenorhabdus sp.
GKLYVIGVGPGASDLITVRAARILAELDVIYTPTGKKGTKSLAHSIIEEYLLAETKVFTYHFLMKADIDAKNAVWDEVAHSLQEEVFNGRKVGFITLGDPMLFSTWVYLLQRLVSTQMVIPPWLEIVPGITSFSAIAAASTMPLAMENQTLAVISCTASETTLEQALLNHDCLVLMKVYSRFPLIRNLLQRHNLLEHALMMADATLPGEQCWRDLTTLPFSEKDCRQELSYFSTILINKNWQLSR

SEQ ID NO: 5868 - protein, 262 aa, Xenorhabdus sp.
MKKALLVISFGTSYHETLKNNIEACEQQLASVFPDRELFRAFTSGMIISKLRQRDDIHIDNPHDALTRLHHAGYNDVAVQCLHIIKGDEYEKVLHEVEKFRPRFRRLVLGAPLLSHFDDYLQLMRALHHQLPVLTENECVVFMGHGTEHHAFSAYACLDHLMNHYHFPARVGAVESYPELSLIIKGLQEHRIRKVYLMPLMLVAGDHAINDMASSEDGSWKSQLEKAGIAAIPWLQGLGENPKIRQMFVDHLTCALNCQEKA

SEQ ID NO: 5869 - protein, 237 aa, Xenorhabdus sp.
MDTVGINYCLSVATSAGVQQATGIRGEIITGRMEAEEMVDYLKTREMERVIDASHPYAKLLSQNIVSVCQKLGIPLIRYIRPSDIDAVENPLIHKVTTIKQACEIAVRLGTRILLTTGSKQLADYMMYLKEKTVLARVLPTAEVLKMCESCGLSVDQIFALKGPFSADFNRAFYQFCRADVVITKESGEQGGFREKVEPCLSLGLPCIVLCRPEQQFEGEGITQIHGLEEMACLLAN

SEQ ID NO: 5870 - protein, 241 aa, Xenorhabdus sp.
MLTVIGIGPGSEAMMTQEAIAALKAADIVVGYKTYIHLVKPLVGDKEIIKTGMCKEIERCQTAIELAEQGKNVAVVCSGDAGIYGMAGLILELVSQQKRNVEVRLVAGVTASTACAALLGAPLMHDFCHISLSDLLTPWELIEKRVKVAAEADFVICFYNPRSRGREEHLARAFALMEPWKSADTPVGVVKAAGRKHEDKWLTTFGSMDFSRVDMRSLVIVGNQSTYVRDGLMITPRGYRL

SEQ ID NO: 5871 - protein, 321 aa, Xenorhabdus sp.
CFTSPELVESGFFTFDGSFSNTVRKVFTRYSALIMVGATGIAIRVIAPLLRDKMTDPAVIVLDEKGQFAISLLSGHMGGANKLAQQIADILDGQAVITTATDVNQVAALDLLSQQLDGKMENFRESVKTVNQMLVNGKRVGIWFHPDLSDEKNRYDIRGFIPVDSLEERPELDALVYVSYERTNLMLAIPVFKLIPRRIVAGIGCRLGVEPERCAELLERHLLELNLEPLALKAIGSIELKKDEPALIELSQQHQIPFQTFSVNQLSHYEQVFPTSEFVRKTVGIGSVSQPVAWLMSKGHLVGHTLREQGVTITLGVLSPC

SEQ ID NO: 5872 - protein, 274 aa, Xenorhabdus sp.
MDNVSFDTEKVWFVGAGPGDKSLITLKGYQLLRQAQIVIYAGSLVNHELLDYCRPDAECHDSAGLTLSEITELMVNGVKGKKLVVRLQTGDLSLFGSIREQTEELKNHGITFISVPGVSSFLGAAAQLGVEYTVPEVAQSLIITRMEGRTPMPPQETLEAFAAHQTSMAIFLSVQNISEVVARLIQGGYEQETPVAVVYKATWPISQIVRGTLETITEQERSVGIRKTALIMVGAFLGQEFHYSKLYYARFTHEYRSACHNTCCHHNRCSDNVT

SEQ ID NO: 5873 - protein, 115 aa, Xenorhabdus sp.
SCHQVRIKSGVAPVPLEISADAIFIGGTGGHLTQIIDWALLNLNSGGRLVMTFILLENFTQALSYLGASPVAELDGREIQVGELTALGQGHYFRPNNPTYLLSCLKSSDQEVQNG

SEQ ID NO: 5874 - protein, 238 aa, Xenorhabdus sp.
MQQKLTNSTLLSAIIALLLVMAPQEVFAMHVMEGFLPPMWAIGWWLAFLPCLAVGLVKLRQIVQDEGNQKVLLALCGAFIFVLSALKIPSVTGSCSHPTGVALAVILFGPSVVAILGAIVLLFQALLLAHGGITTLGANGMSMAVIGPLAGYLIWRFSCKMGMRKDISVFLCAFVADIVTYAMTSIQLGVAFPDPQLGMGAAILKFMGIFCITQLPIAVAEGLLTVLIYDQLVKRQLI

SEQ ID NO: 5875 - protein, 228 aa, Xenorhabdus sp.
IIYGALVLLRFCWLWLMKNTSKILMKKKPLEFSTYTTRELLLASFAGVRGAITLAGALSVPLFLPDGDPFPARYQLIFISAGVILVSLFVGVIALPLLLRGMKVGDKQADLDEIRMAKAAMAEVAIVSMNKMEERLSASTEEKLDAEVISEVASRVTGYLRRRTAGTDEGEHSLEVEELERRFRLTALRAERGELYHLRATRKVSNETLQTLLHDLDLLEALLVDKSQ

SEQ ID NO: 5876 - protein, 299 aa, Xenorhabdus sp.
MWLLTITTFLWAASFSLIGAYLAGQVDSWFSVLIRVALAALVFLPFLRWRGLSLKVISLYMAVGACQLGVMYLFVFHAYHYLTVAEFLLFTVMTPLYVTLIYDLLKRQRLRWGYALSSLLAVAGAAIIRYDRLSESFWIGLILVQLANIFFAIGQVGYKRLMEKHPIPQRVAISWFYLGACVVAIIGWLIFGNPQKLPTTQLQWWVLIWLGAGASGIGYFMWNYGATQVDTGTLAIMNNMLVPAGLLVNFVIWQQHPDWLSFSIGGSLIVASLWVHHRWILKPVLQKADYPPRAGAQNE

SEQ ID NO: 5877 - protein, 239 aa, Xenorhabdus sp.
MTVLNHTLGFPRIGLKRELKKAQESYWAGKISQQELLETGRELRARHWQQQKEAGVDLIPVGDFAWYDQVLTTTLLLGNVPPRHQNEDGSIDLDTLFRIARGRAPTGTPAAASEMTKWFNTNYHYIVPEFQEGQEFKLGWTQLLDEVDEALALGHNVKPVLLGPVTYLWLGKVKGKAFERLSLLADILPVYQQVLGELAKRGIEWVQIDEPALVLELPEEWLAAFQPAYQALQGQPTYC

SEQ ID NO: 5878 - protein, 278 aa, Xenorhabdus sp.
VLVHGEAERNDMVEYFGEHFDGYVFTQNGWVQSYGSRCVKPPVIIGDISRPEAITVDWATYAQSLTDKPVKGMLTGPVTILCWSFPREDISRETIAKQIALALHDEVDDLQKAGIGIIQIDEPALREGLPLRREEWQAYLDWAVDAFKLSAAIAEDETQIHTHMCYCEFNDIMPSIAALDADVITIETSRSDMELLDSFEDFSYPNEIGPGVYDIHSPNVPSVEWIEALLRKAAERIPVERLWVNPDCGLKTRGWAETRQSLANMVEAAKRLRDSVNS

SEQ ID NO: 5879 - protein, 240 aa, Xenorhabdus sp.
MRIHFVVHEYFEAPGAYEDWAKARGYQTTFSRVYLGEKLLDSLDDIDFLIVMGGPQSPATTIAECPHFDAASEKQLILKAISSNKAVIGVCLGAQLIGTALGAGFANSPEKEIGKYPIMLTEEGLKNNKFSHFGEMLEVGHWHGDMPGLTPDAKIIAFSEGCPRQIIEYQHLVYAFQCHMELTTEVVELLIQNSEKELSKANEYKFVQTPEVLRTHDYSEMNNKLFVFLDKLTEKYLMMN

SEQ ID NO: 5880 - protein, 88 aa, Xenorhabdus sp.
MDINNKARIHWACRRGMRELDISIMPFFEYEYDSLSDDEKHIFVRLLECPDPDLFNWLMNHGRPEDEALFGMVQLIQSRNQARGPVEQ

SEQ ID NO: 5881 - protein, 318 aa, Xenorhabdus sp.
MIEIKHLKTLQALNLCGSLAAAANHLHQTQSALSHQFSELEHRLGYKLFIRKSQPLQLTHQGEVLLKLAEQILPMIKASLSECNEPEETNLRIAIECHSCIQWLTPALKLFRESWPLVNVDFKSGVTFDPQPALQQKELDIVLTSDILSDSDLHYTPLFDYEVKLVVAPDHPLANQRDIQPQDLAPETLLIYPVQRQRFDIWRRFLQPAEVTPTLKTVDNTLLLIQMVAARLGIAALPHWAVETFERQGLVVTQTLGEGLWSRLYAACRKGEQHQPAIDTFIRSARQHAVDSLPFVKRVSISSGDAPKAMQQSGCLQC

SEQ ID NO: 5882 - protein, 132 aa, Xenorhabdus sp.
ITMSFFDQISNMMSRGKSQQIQHIMDWVEGQGGISGLVEQFSRQGLDGTIHSWIGTGENTPIHADQVSSIFGSSTIQTLAEKMGIDPSEASSLISQHLPNLIDKVTPNGEVPENLDLKSVGMNLLKNKLLTK

SEQ ID NO: 5883 - protein, 251 aa, Xenorhabdus sp.
RPMLSDPVWDKLFVFMQQNRLTYHKKTHRLIMEGILFRMRTGIPWRELPAEYGKWNTVFKRFNVWSKKGVFNSLFNELAKNSDTEWLFIDGSIVRAHQHSSGAASKENEAIGKSRGGRSTKIHLAVDSYGLPVHFELSEGQTHDMVHAESLVAQSPPADFVVADKGYDSQALRTYIEEQGATAVIPYRKNSRNSDKKWDKDLYRYRHLVENAFARIKHFRAIATRYDKLARNYASTLALAFIIIWLPMWVE

SEQ ID NO: 5884 - protein, 193 aa, Xenorhabdus sp.
FGPFTDVISFIMELDKLKNVYRKTKILSNERHENSAEHSWHFALAVISFAPYASNVNISRVIQMALIHDIVEIDAGDVIAFDLAAREAIHEQEVQAAKRIFGLLPESQRDHFLALWHEYEDGETPEACFAKMLDRVMPVLMNLHNNGQSWVENGIRFEQAFNLLSFISESYPEFWKYLLPQLEAAREKGWLKE

SEQ ID NO: 5885 - protein, 327 aa, Xenorhabdus sp.
PFSAQSPSPSATLPLTLISLDDWAIVTAIGADAEKYLQGQVTADIHSLDANQHVLCAHCDAKGKMWSNLRLFHRGEGFAYIGRRSILDTQLAELKKYAVFSKVTFAKDEESILLGIAGSGSREALAAFFPVLPDTETAVIQHETTTLLHFSLPTERFLLITDSATAAQLTETLVEKSQAQMNNSPQWLALEIEAGFPVIDETNSAQFIPQATNLQALEGSINFQKGCYTGQEMVARAKYRGANKRAMYWLAGNASSLPVAGDDLEWQLGDKWRRTGTVLASVRLADDSVWIQAVMNNDMEADSVFRVREDEHSSLSIQALPYSLEEK

SEQ ID NO: 5886 - protein, 131 aa, Xenorhabdus sp.
VPVIQARRLADPLAADAPLNTLSPAFLAVNPMGTIPCIEDDGMVLYESMAINLYLARKYGGPLAPVDLKEDAAMLQWSFFAATEIETNSLKISSAIAEGLSESDSGKAVIDVAARLLKRPFRVLEQHLSSQ

SEQ ID NO: 5887 - protein, 76 aa, Xenorhabdus sp.
ALKQEDGRRSIVEITPLGTSLLHEMRRTKMSVIEDVMEGWPADDVETFARLFERFIDRFEYRLSPDTDFFTDQKKS

SEQ ID NO: 5888 - protein, 331 aa, Xenorhabdus sp.
MALNGQGLAHAENSQNDILNIRKAVISGDWSSINKGICTLTDLGLRHNGQGLVWLNSGVSVHDAEGDTGLTGKAKTSFDYHTALCPSNALENNTFYRGVHPHKVDSYCLLILSESDSWVEYWHRKDGKALTTFAVQVLTNERQEAFDNWVIYRHPVQPDKYTVINAEKDKALVQEYIRHGWLCESTHELSLLVKSNIEFGRLMTRLGYIKIRTAKITGHKETFWVYRSAEKGLSTREKQPQIDTSYTRVIARVSHGKQSLCPNNSLKNNGFIPFVQCGKRPIRTFERIAVDGQWLYVYADHIRFLTKKRHRVEGVRVQGYTANGIELREVV

SEQ ID NO: 5889 - protein, 84 aa, Xenorhabdus sp.
MTIQYTTPTPEERRSILSEYGEPYDRLVREKERQHITSISRTSAWKLENEGRFPARKPLGRNSCAWLLSDLGECGYVIRQQYKT

SEQ ID NO: 5890 - protein, 99 aa, Xenorhabdus sp.
MASYLIRVELYGTGSAGYEKLHKRMVGNQFSRSIRFPDGKWHRLPSGTYIGNSSLGSLQLAEKIKSIAKSYSSKDPSIFVCTYSNWSAALYIDKEHPEN

SEQ ID NO: 5891 - protein, 246 aa, Xenorhabdus sp.
GGVIFAQLFHQGADDSGRLDPSLAWSPSGFSAAHGSYGKAMTLDDIDEIIASFAETASFAQSVGFDGVEIHGAHGYLIDQFLWANTNRREDVWGGSIRNRAQFAAQIIAAVRRVTGRSFPISFLFSQWKMGANNAAIATSPQDLEILLDPIVQAGVTILHASDGYFDQPAFRNSDRSLAVWVKELTELPTIAGGPIDLSLSGWPSYSTDLEVLIRQLDNQQIDLVAVGRQLFSEPNWVSELQRMSQ

SEQ ID NO: 5892 - protein, 141 aa, Xenorhabdus sp.
PFWQMKTLEQMTDQEWEALCDGCGQCCLHKLMDEDTDEIYFTNVACNQLNIKTCQCRNYEDRFSYEPDCIKLTRENMVTFEWLPTTCAYRLIDEGKGLLPWHPLVSGSKSAMHAERISVRHIAVREVDVVDWEDHILNKPE

SEQ ID NO: 5893 - protein, 218 aa, Xenorhabdus sp.
MYQHRDWQGALLDFPANKVVCVGSNYAKHIKEMGSSITDEPVIFIKPETALCDLRQPISIPEKLGAVHHEVELAVLIGSTLKNANEERVSNAIAGFAVALDLTLRDLQREFKQSGQPWEKSKAFDGSCPISGFIPVNVFEDPQNVHLSLTVNGELRQNGNTSDMRTPIIPLISYMSQFFTLRPGDIILTGTPEGVGALKSGDVLNVSLNEHVLTTRVI

SEQ ID NO: 5894 - protein, 361 aa, Xenorhabdus sp.
MKLIIKVPLLLSVILLAGCISPDKKIQQDSGLTVLSQVDVKVLEQQFPRASRESSQFPAYVALIRQQARQQGISEETLKRAFADIHFIPRVIKSDRNQPEKKATLDEYLKRVLPDWKIKQGVEQYQNNSLQLERVGRKYGIPESYIVALWGLESGFGRIQGKEDVISALSTLAFEGRREDFFIKQLLAALEIMEKKYIGADQTLKGSWAGAMGQSQFMPTSYLTYAADGNGDGKIDIWNNKEDVFASTANYLHKEGWQKGLPWGFAVSLPANFDKALEGVKVEQGKSISQWQSLGVFSPEFAQLPAKTNGWIIITDGVEPQAFWVTQNFRTIMHWNRSYYFALSVGMMADGIEQRMRHLTH

SEQ ID NO: 5895 - protein, 93 aa, Xenorhabdus sp.
CSSMCSKIYRSPKREQTYLYLTKKGDFSSVPEELLKAFGEPQFSMMISLSERKKLANADIEKVKAALSEQGFYLQVPPPVESLINEHLAAAKS

SEQ ID NO: 5896 - protein, 911 aa, Xenorhabdus sp.
MLTLFKELNKNQASVWVYENKLKLTFTGGTPPDQLIDQVKQKKENILNFLNEKNIFSVEDFRRFISLENSSGVPATSSNNKKIEAIFPATSLQQGFVYHYLSQPQDDAYRVQLLLDYHTSIDIDAYQQAWTLASRRFPILRTAFDWEGEILQIVTTGASIDATNFRYEDITELSEEEKNRAIDTLQQNDLTLPFDLRQTGLARFTLIKQRQQLITVVITLHHSIIDGWSYPVLLQTVHGYYNALVQGHTPEIVVDNAYLNAQQYYRNHQADTDIYWSERKAQWQDTNDLSALLSHRVDLTQIKAIEKPAEQLLTVQGNAYEQLKNTCRIHGITLNVALQFAWHKLLHIYTADEQTIVGTTVSGRDIPVEGIESSVGLYINTLPLAVQWKQTDSVVTVLQHIQKNIADLNSHSAVSLASLQSDGERLFHSLLVFENYPAPVADENQTGIEQTLTFRRAVEKVDYPLSLIAYEQDNRLVIKFNYGKDWLEDEQALRLLRQLERILHAVACHPEQSHTAITCLSEAERHTLLHSWNQTDAPYPQDKTLPQLFEAQAAQHPDAIAVEFEEQVLSYGELNCRANRLAHYLMTLGVGPDERVAICVERSPEMVVGLLAILKAGGAYVPLDPALPDERLAHMLRDSAPVALLTQSTFAQALEAALPSASHTVLLDKQPAYLTNLPAHNPAAPALAPHHLAYVIYTSGSTGLPKGVEMPQSALSNLLHWHHHTPEHSTTAGKTLQFAALGFDVAFQEIFTTLCEGGCLVLIHDSLRRDPQQLLKLVQQQQIERLFLPYVALQHFAEAVNLSEEDDLSCLKHIITAGEQLRITPAIQRLLRRARHYRLHNHYGPTESHVVTSYTLDNETEHWPTLPPIGRPIANTQIYILDPHGQPVPWGSHRRNLYRRKRRCPRVSQSS

SEQ ID NO: 5897 - protein, 2603 aa, Xenorhabdus sp.
APSMCSKELKTIAGLATQMDTQIHTVIPPLAQVRYPLSFAQERMLFIEQFEQGSDVYHIPYLVQLTQDTSLTVLEAAINRLAERHAVLSTVYRSDDQSQQYQQVLDTHFVIPSQICDDRETLLANARSEIATPFDLTTEPSLRLRHYQVADRHYLLLLWHHIAMDGWSIDIFMAELAEVYHSLQAGRDSQLPALDITYGDYAAWQRDYLQGDIREQQLAYWQQTLAGYESLALPTDHPRPAQVNYQGRDINFTLDAQLSEQLRALAKTQETTLYTVLLSAFYVTLAKLSGQDDIVIGTPTDNRHHAQTLPLLGMFVNTLPLRAQLQHTDSVTALITQVHKLVSGAKAHQDMPFEQLIEALNIERDTARHPLFQVMFSVQAFGENPSDGNLPFSPVVLDETLYSPAKFDLSLFLSDGKTAITGCLNYALSLFNDTSITRIAESYQRVLSAFVADQQQPLSSIDILSAQERHTLLHRWNQTDAPYPQDKTLPQLFEAQATANPDNIALVFEGESLTYHQLNERANQLARVIRERYQQQHNVPMPTDTLIALYLDRSPEMVISILAVLKAGGAYVPVSPDYPPERIQFILDDTQSPCVVTQQKFLPTLEAYTQALVTPSALIAADDRRVTENYSTENLALAGQAANLAYVIYTSGTTGKPKGVLQTHHNVNRLFTTSQKDYQFDQHDVWVLFHAYTFDFSVWELWGALLYGGRLIIPTVECIKDFSQFSRLCAEQNVTVLNQTPGAFYAFIDEAVSNSTEFPHLRYIIFGGDKLNPVQLTPWWDRYGDQKPALINMYGITETTVHVTYKKLTQGDTTAISRIGRPLSDMSAYVLNTAGQLAPIGATGELYIGGAGLAQGYLNRPELTAERFIENPFATEKNKEQGYTRLYKTGDLARWLPDGELEYLGRNDFQVKIRGYRIELGEIESALAEHPLIKQAVVIDRDYQGNTALIAYLVIEGELSDEGLIRHLSSRLPDYMLPASFTRIKAIPLTLNGKVDRQALPEPNWSNKEGYVAPRNTLETQLCAIWQDVLALERVGIDDNFFRIGGNSLTAIKLIAAIRRTLSIDISLAQLFELKTIAGLATQMDEQICTVIPPLAQARYPLSFAQERMLFIEQFEQGSDVYHIPYLVQLAQEASLPVLEAAINRLAERHSVLRTVYRSDDQSQQYQQVLEKHFVIPSQICDDRETLLANARSEIATPFDLTTEPSLRLRHYQVADRHYLLLLWHHIAMDGWSIDIFMAELAEVYHALQAGRDSQLPALDITYGDYAAWQRDYLQGNIREQQLAYWQQALAGYESLSLPTDHSRPAQVNYQGRDINFTLDAQLSEQLRELAKTQETTLYTVLLSAFYVTLAKLSGQDDIVIGTPTDNRHHAQTLPLLGMFVNTLPLRAQLQHTDSVTTLITQAHKLVSGAKAHQDMPFEQLLEALNIERDTARHPVFQVIFSVQAFGENPSDGNLPFSPVALDEALYSPAKFDLSLFLSDGKTAITGCLNYAVSLFNDTSITRIAESYQRVLSAFVADQQQALSSIDILSVQERHTLLHRWNQTDTPYPQDKTLSQLFEAQVARTPDHVALVFEGESLTYHQLNQRANQLAHAIRERYQQQHHQTMQADTPIALYFDRSPEMVISMLAVLKAGGAYVPISPEYPTERVQFILTDTATPCVLTQQHYLTTLRPLAGSSILIAADNQADTVSQPVENPDSISKPTDLAYIIYTSGTTGQPKGVMVEHKNVAHLTAAQSAFFDTEKTTKSLMFAAYVFDAFVFELFPALLNGLTLYLCNEAERHAPAIAQLIQREGIQMATLPPAILKLLTDVELPSLQLLVTAGESPSLDFMDHFSQHSNVMNAYGPTEITVCATQKRYQHGDIATNIGQAINNVRLYILDSDGNPSPIGTPGELYIGGAGVARGYLNRPELTAERFVANPFATANETVKGYTRLYKTGDLVRWLPNGELEYLGRNDFQVKIRGYRIELGEIESALTAHPQVKQAVVIDREHQGHKVLAAYLVVEDTVSDNILLAHLSARLPDYMLPASFTFMEAIPLTLNGKVDRKALPEPVFGNRENYVAPRNALETQLCAIWQAVLGLERISIHDNFFRIGGDSIISLQLVSKLRQAGFSLQVKTIFEAPTVAQLAVLLMQTASTAKIVAEQGLLNGEFALLPVQQTFFDWQLAQPHHWNQAFMVQIPGDIQVIQIEQALTALTERHDILHARFIATEQGYRQCYSADIPSSQPQLKHCDIRQCNQEELHQQLTQWQSGFDYHNGPLWQAAHLTGYADGSTRLFFAFHHLIIDAVSWRIIAEDMRLLLQGMPLPAKTSSYRQWVTTVQQYARQHQHEVPYWKQVLTGNNSKPALDNLTHHQLEISAEMTDILLHEANAGYHTEINDLLLSALTVALQDTFDQSVNHILLEGHGRESIDNTIDISETVGWFTTIYPVRLENKADITDTLIHTKEMLRTVPNKGIGYGALQQAGYLTGDLPAISFNYLGQLGSPSRQDWSITDDDCGTMITSENGGHFLLGINGSVQAGKLLFYVDSRLPKTKTALFIRAFEQALNHIITTAQKQSQTGEIMTPSDYGIKGVSLEQFNQITHHFEHTNHVSSPHDSENETTLDL

SEQ ID NO: 5898 - protein, 171 aa, Xenorhabdus sp.
LSIDGVLFALSYEGELYLRGNSYAETLFKAKGMETFIYSKRGIPVALRYYRVSESLWRDQKQLFEYVNLAYQDTLTDIINKQRTPLRLKDLPNLGMALERQLWKAGISKVEELRVLGAKVTYLKLQQNGKKISVNILLALAGAIEGCHVAVLPEKLRHDLLVWYQELEHGN

SEQ ID NO: 5899 - protein, 689 aa, Xenorhabdus sp.
MELKSTQIGQRLARHPYNRVRLLSAGIEVSGDKHQYLIPFNQLIDIQCKRGLVWGELEFELPEGKVVRLHGTEWQQTQRFYHYLFKEWQAWSSDMSGISSGVLSAQVNKIDKIRQQDYWMKAEDLILLQQKIHETFQSIPLPLQRLKDFANCRDNYQTCLIWLNEGEEQRKLINQQWAERIQKRYGELFQISENVSFNPLQYQAVINGEKSILVSGSAGSGKTSVLIARTEWLLLRQQALPEQILLLSSGQKLVEEINKRLQLRSGTKTIKARTFHELALCIIRQANSNTPKISELETNTQKSHDFLIREWQRQCNEKKAQAKGWREWLNEELGWQLPDGAYWNDRQVQSRLSSHLDYWLELMRMHGGSQKEMLERASSEYSDIFPKRIRLMAPLLKAWKSALKEEGALDFYGLIHQAVNTLQKGRFISPWKHILLDNLENISPLSIKLLTTLQAQNRQSHIFAVGDNWQGVCRFNSLEWPSIKTFSAYFGESDECILDTTYRFNERISKIINGIARLFHSQVSDSLCRLTNHSSIKGNKKSVMILPEEQLEALLNRMSGYVTSQETIFLLARYHFHKPGLLKKAATRWPNLNINFMTIHESLGQQADYIIILGLRKGKEGFPASEKETVLEQVLLPKPEIFSDTQEQRLLYIALTRAKKQLWLMQEPKNPSVFIHQLSKLGVPEHRKP

SEQ ID NO: 5900 - protein, 268 aa, Xenorhabdus sp.
LTNIKLDWQSLQPNSVPYQSLFNSVSESPSAPLEVIQPRLHNGLTLFCQANLRQSFMLLKAEESDACLALLSDTVSTLLPESYPNVGGYYQIEHQTITWHSSGEGPFSPNQRIAYREWIEPEQLFGNIYTHQNVLQLQPGLIHQVNGGVLILPLRTLLSQPLMWVRLKQMIIQRRFDWLPHNENHSLPLPVPSIPLDLRLILVGDRFSLDELHTIEPELASSALYSEFEPDMPFHEEDDLAMWCRYVSGFIQQQKLPSLSQDAWSELL

SEQ ID NO: 5901 - protein, 359 aa, Xenorhabdus sp.
VAQAAPKEHTWYAGTKVGWSDYSRTGFKDIDAAKIATGNADKKDALGAGAYVGYQATPYIGFELGYDWLGKMTYKSKINDASFKSQGIQLAMKLSAPLTDSLDAYTRLGGIVWHSNASANYSHSDKTKDYVKNNSTGISPLIALGAEYALTKNVATRLEYQWAPKVGQSGKGSSDAYTQDRSSYLGPKPNNGLLSLGVSYRFGQDDEATPPPVIPAPMPVVENKSFTLRSDVLFDFNKSTLKAEGKQELDSLYNQLSKIDPNQGHVVVLGYTDRIGSQNYNLPLSQKRAQSVVDYLIAKGIPANSIQAEGRGKEDPVTGSTCDNIKARSTLISCLSPDRRVVINIQGTQEVTVPAKVAL

SEQ ID NO: 5902 - protein, 138 aa, Xenorhabdus sp.
NGTIHELSYCEQWPVVNHILLPLLHQSRNENRWLLWITPNKRLNRQWLVDSGLPLDKSVQLNQITPIASPYAMEKALASGSYCIVLGWLPELSEYGVKKLRLAAQKGTTLGLIMRPQASPEQYNPVESRIKFHSIYYH

SEQ ID NO: 5903 - protein, 727 aa, Xenorhabdus sp.
RHFLYNNHVFYYIRIFIALTGTTLVPWLLKEEPKITIPLTLGVVAAALTDLDDRLAGRLRNLVITLVSFCIASVSITLLFPYTWFFALGLAISTCSFILLGALGQRYATIAFGALLIAIYTMLGTSIFPVWYQQPLLLLTGAIWYNLLTLAGHGLFPIRPLQENLALCYHQLSVYLHAKTNLFDPDAEAEEYEQAVFDIAMANSTLVSTLNQTKITLLSRLKGDRGQQGTRRTLHYYFVVQDIHERASSSHIQYQKLRETLRHSDLLFRFQRLLSMQAHACEQVSQSIILRKQYQHSSRFENAFTYLEISLEKLKNQQLVDTKLVAFSNLLKNLRAIDAQLAGLSSEQYLILQETAQYNKQSDDRQSHDKQYNDKQEETQLSDEALTGWRDISFRLLSNLTPKSALFRHAIRMSALLCTGYAIIQLFDMQRGYWILLTSLFVCQPNYSATRRRLALRVIGTLAGILIGLPILYLVPSIEGQLLLIVISGVLFFAFRSSQYAHATLFITLLVLLSFNLLGEGFEVALPRIVDTLIGCGIALLAVSFIWPDWNFRQFPQVITRTMNANCHYLNAILLQYHQGKSNCLEYRVARRNAHNYDAELASVVSNMSSEPKHHRISQEEAFRLLCLNHTMLSYISALGAHRDRLNEPVILELLTEAIRHVESALQQDRVNDEFLHQISEHLIQKSNQLTSDNSKVQLVLQQVGLLVELLPEIVNLKKQINNQKSN

SEQ ID NO: 5904 - protein, 152 aa, Xenorhabdus sp.
MELTTRTLTESKSIALIAHDHCKQSLLSWVNEHKRVLEQNRLYATGTTGNLLQQQTGLPITSLLSGPMGGDQQIGALISEGKIDVLIFFWDPLNAVPHDPDVKALLRLATVWNIPVATNRTTADFLIKSSLFTEKVDIYVPDYQGYLDERLK

SEQ ID NO: 5905 - protein, 129 aa, Xenorhabdus sp.
MDISKYSNNWQERFEFFQKNGAPSSKEYQAAFKKAPYITRIKINMNFFAFFFGILYFIVLGMWKKGLTILGIGVALFFAFFMISAIVPLSLETANFISIFLGAMNAALYGVTANYSYYLKEKEGDDSWN

SEQ ID NO: 5906 - protein, 88 aa, Xenorhabdus sp.
CSKEGYRVHIQRKAARNKPLSHCQKGRNKKIAKTRARVEHIFGSLSQMGEKIIRTIGQLRANFAMTMKATCYDLQRLVYFGKSGIHAF

SEQ ID NO: 5907 - protein, 158 aa, Xenorhabdus sp.
VRGVMKTINQKKLLTQAEAICLSRGVRLTPQRLEILRLISAQPGAISAYDLLDLLREVEPQAKPPTVYRGLEFLLEQGFVHKIESTNSYVVCHHFEEPCHTSAMFLCDNCGSVTEQDAEDIESAIQNLAQRAGFHLRHSVIEVHGLCSSCHDTNSCIE

SEQ ID NO: 5908 - protein, 822 aa, Xenorhabdus sp.
MSAWRKIYYNLLNLPIKLLVKSKLIPTVPVTELSLDTTRPILYVLPYHSKADLLTLRQQCLAQDLPDPLAPLDIDDTQLPSYVFIDDGPRVFSYYAPKHESVKIFHSYLDLHRSNPDLDIQMVPVSVMFGRSPGREGQETNTAPQLRLLNGIQKFFAILWLGRDSFVRFSAPVSLRSIADEHGTDTIIANKLARVARIHYSRQRLAAVGPRLPARQDLFRKLLESKAIEKAIADEARSKKISPEKAKQNAINMLEEIAADFSYETVRITDRVLSWTWNRLYQGINVHNGERIRQLAQDGHELVYVPCHRSHMDYLLLSYVLYHQGLVPPHIAAGINLNFWPAGPIFRRLGAFFIRRTFKGNKLYSTIFREYLGELFSRGYSVEYFVEGGRSRTGRLLDPKTGTLSMTLQAMLRGESRPITIVPIYIGYEHVMEVATYAKELRGATKEKEGFFQMVRGLRKLRNLGQGYVNFGEPIPLVQYLNQHVPEWRDAIDPIEAQRPTWLTPTVSKLADNIMVNINNAAAANAINLCSTALLSSRQRALTREQLIEQLDCYMQLMSNVTYTNDVTIPAKTAEELLDHALRMNKFEVEKDSLGDIIILPRESAVLMTYYRNNIQHLLVLPSLIASIVMHHRRISRTELLRQVELIYPLLKQELFMRYSKAELPDVVNTLIDELVRQRLICNKEQEVLVLNPERIRPLQLLAAGIRETLQRYAITLSLLNATPDISRGALEKESRMLAQRLSVLHGINAPEFFDKAVFSCSVNTLREEGYIHDSGNIITTNAQALYQVLSELMSPEIRLTIESVSMPPEHSDQESTDEIQE

SEQ ID NO: 5909 - protein, 205 aa, Xenorhabdus sp.
MKALTARQQEVYNLVRDHISQTGMPPTRAEIAARLGFRSPNAAEEHLKALARKGVIEIIAGASRGIRLLLEEEAEGAGLPLIGRVAAGEPLLAQEHIESHYKVDPELFKPNADFLLRVRGMSMKDIGIMDGDLLAVHKTQDVHNGQVIVARIEDEVTVKRFKQTGNKIELIAENPEFKPIVVDLREQNFTIEGLAVGVIRNGDWF

SEQ ID NO: 5910 - protein, 123 aa, Xenorhabdus sp.
MANQSTGLTRIIKAAGYTAKGIKAAWKNEAAFRQEAVLAILATIVAFSFDFGMFERLFLISSVMLVLIVEMLNSAIEAVVDRIGSEYHELSGRAKDMGSAAVFLAMILALFIWVIIIWSYFTR

SEQ ID NO: 5911 - protein, 172 aa, Xenorhabdus sp.
TIALSFAGLGLACVYPFVKRVSNLPQVVLGAAYGWSIPMAFSAVSESLPLECWLLFLANVIWSVIYDTQYAMVDRDDDLKIGVKSTAVLFGRFDKLIIGILQLIMLAILIMVGCLVNLGGMYYWTVLLAGALFIYQQKLIFDRSRESCFQAFMNNNYVGFVLFLGILFSYVF

SEQ ID NO: 5912 - protein, 227 aa, Xenorhabdus sp.
MKIAFLLYPDVTLLDFAGPAQILARLKGVSLHFVAKTKDLVTTDAGCSVLPTDCLSDLQSADILCVPGGLSSIDVMEDEEIISWVTKIGAQCQWVTSVCTGSMILAAAGLLKGYRATSHWVLRDDLALFGAIPTKGRVVFDRNRVTGGGVTAGIDFGFALSAAIQGDDHAKLIQLEYEYDPVIPVSGGTPETAEKHILAQAKSDFEHMLPNHRERSIKVAERLSLKQ

SEQ ID NO: 5913 - protein, 368 aa, Xenorhabdus sp.
MFHRLYTLVMKELQSLLRDPQTRATLILPVIFQMILFPWAATLEVKNATIAIYDEDKGQVSIELTQRLAKSKAFPDLIMLNSSQEIRPTLDNRDALLLVRFPQNFSAHIASHSPTSIQVLLDGRNSNSAQIAANYLQQIVMNYQKELQGNTPGLNNSELIIRNWYNANLDYKWFVVPSLVAMITTIGVLIVTALSVAREREQGTLDQLLVSPLTTWQIFIGKAIPALVVATVQASIVLLIGTLCYQIPFSGSLLMFYGCILIYGLSLVGFGLLISAICSTQQQAFIGVFVFMMPAILLSGYISPVENMPIWLQDITWINPIRHFTDITKQIYLKGADFSVIWHSLWPLLVIIVTTSGIAYRLFRSKIA

SEQ ID NO: 5914 - protein, 392 aa, Xenorhabdus sp.
MSRNEENHAEQALKTQKAVSFSWRRLKALCIKESKQIIRDPSSTLIAVVIPLMLLFIFGYGINLDSSKLRLGILMEQQSKDAQELVHAFTGSPYIDATISNNRQLLINKIQAGEIRGIIVIPVNFDAQLARVGDHAPIQVITDGSEPNTANFVQGYAKGVWQIWLQQRGQNQGTSITPLIDMQIRYWFNPAAISQHFLIPGAISIIITVVGAILTSLVVAREWERGTMEALLSTQVTRTELLLSKLLPYQVLGSFVMVLCMVFAVFIMGIPYHGSLWILALVSSLYLATALGMGLLISTITRNQFNAAMISLNAAFLPAIMLSGFVFEINSMPLLIQLSTYIVPARYFVSSLQTLFLAGNIGTVLITNLLFLIASAIVFIGLTAWKTRRHLD

SEQ ID NO: 5915 - protein, 571 aa, Xenorhabdus sp.
IKLNGVEKTFPGLEIPAVSQLNAELFGGSVTGLVGPDGAGKTTLIRMLAGLLKPNRGTIEIMGLDPIKDSVEVRSKLGYMPQKFGLYEDLTVQENLNLYADLRSVTGEERQSTFRKLLTFTDLTRFTGRLAGKLSGGMKQKLGLACTLVGSPKVLLLDEPGVGVDPIARRELWQMVHELASDGMLILWSTSYLDEAELCPDVLLLNQGELLYRGQPQKLTQGIAGRSFLLDIKPESRRRILQQALTLPQVTDGVIQGRYLRLILRAGADSAELCQQLGLPDIKLFDAEPRFEDAFIDLLGGIPSRRSELAEIMPQNPSNRTEPVIEARNVTKKFGDFTATDHVNFQVKRGEIFGLLGPNGAGKSTTFKMMCGLMLPTHGNALVLNMDLKTDSGQARQHLGYMAQKFSLYGDLTVEQNLKFFSGVYGLSGRQQKKKMAEMISSFSLKPILYQTTDSLPLGFKQRLALACALMHEPDILFLDEPTSGVDPLTRREFWLHINGMVDKGVTVMVTTHFMDEAEYCDRIGLVFRGKLIAAGTPDKLKRQVSTTERPNPSMEDVFIDLVVNYDKEPQ

SEQ ID NO: 5916 - protein, 304 aa, Xenorhabdus sp.
QERNDKDLTLYGNVDIRTVNLGFRVNGKLETLHVDEGDTITAGQLLGQLDNSPFINALNQARANRDAAKANLIKAEAGYRSEEIAQVRAEVAQKESAFRFTDSFLKRQQELWQRKMISANELENAKTGQRQALAAYQAAKDKLRQFEAGNRKEDIASAKAQFTQAEAAVAQAELNLQDTHLLSPSDGIILTRAIEPGTILAAGNTVFTLSLTNPVWIRAYIDEPNLSQATAGRDILIYTDGRKNQPYHGKIGFVSPTAEFTPKNVETPDLRTDLVYRLRIIVSDPDEGLKQGMPVTLRFTDSDK

SEQ ID NO: 5917 - protein, 804 aa, Xenorhabdus sp.
MSNTYDSSSIKVLKGLDAVRKRPGMYIGDTDDGTGLHHMVFEVVDNAIDEALAGHCDKIVVTIHADNSVSVQDDGRGIPTGIHEEEGVSAAEVIMTVLHAGGKFDDNSYKVSGGLHGVGVSVVNALSEKLELTIRRDGKVHEQTYQHGVPQSPLKVVGDTEQTGTTVRFWPSMDTFKVNTEFEYDILAKRLRELSFLNSGVSIRLVDKRTNAEDLFHYEGGIKAFVEYLSRNKNPIHQNVFYFSTEKDGIGVEISMQWNDGFQENIYCFTNNIPQRDGGTHLVGFRTAMTRTLNSYMDKEGYNKKSKVSATGDDAREGLIAVISVKVPDPKFSSQTKDKLVSSEVKTAVETLMNEKLVEYLLENPNDAKTVVGKIIDAARAREAARKAREMTRRKGALDLAGLPGKLADCQERDPAHSELYLVEGDSAGGSAKQGRNRKNQAILPLKGKILNVEKARFDKMLSSQEVATLITALGCGIGRDEYNPDKLRYHSIIIMTDADVDGSHIRTLLLTFFYRQMPEIIERGYVYIAQPPLYKVKKGKQEQYIKDDDAMEAYQMSIALDGASLYTNPHAPALKGEALEQLVTEFNAAQKIIKRMERLYPQALLSNLVYHPKLTEDTLTDQTKVEEWVSALTIRLNDKEQHGSTYSYQIHENRERQVYEPVLCIRTHGVDTNYNLDFDFIHGGEYRRISKLGELISNLIEEGAYIERGERRQPVSSFEQALEWLSKESRRGLSIQRYKGLGEMNPEQLWETTMNPETRRMMRVTVKDAIATDQLFTTLMGDAVEPRRAFIEENALKAANIDI

SEQ ID NO: 5918 - protein, 376 aa, Xenorhabdus sp.
MILSRLLIRDFRNIANADLPLATGFNFLVGPNGSGKTSVLESIYTLGHGRAFRSIQAGRVIRHDSEEFILHGRLEQQSHERTLSVGLSKNRQGDSKVRIDGSDGHKIAELAKMLPMQLITPEGFTLLNGGPKYRRAFIDWGCFHNEPRFFAGWANLKRLLKQRNAALRQVTRYSQIQHWDHELAPLATQISQWRAEYIAGIAEDIEKTCKQFLPEFTLNISFQQGWDKESEYAELLARQFERDKALTYTASGPHKADLRIRADGTSVEDMLSRGQLKLLMCALRLAQGEYFTRQSGQKCLYLLDDFASELDAGRRKLLAERLKSTQAQVFVSAITPEQVADMIDVNSRMFSVEHGKICPMDFEFSQHSKGDSKDEG

SEQ ID NO: 5919 - protein, 366 aa, Xenorhabdus sp.
MKFIIEREQLLKPLQQVSSPLGGRPTLPILGNLLLQVTEGSLLLTGTDLEMEMKARVTLTQPHEQGATTIPARKFFDIWRGLPDGAEISVELDGDRILVRSGRSRFSLSTLPASDFPNLDDWQSEVEFSLPQATLKRLIESTQFSMAHQDVRYYLNGMLFETEGEELRTVSTDGHRLAVCSMNIGQSLPSHSVIVPRKGVIELMRLLDGGDNPLQLQIGSNNIRAHVGDFIFTSKLVDGRFPDYRRVLPKNPDKTLIANCDTLKQAFSRAAILSNEKFRGVRIYLSENQLRITANNPEQEEAEEIVDVSYQGTEMEIGFNVSYVLDVLNALKCEQVSLLLTDATSSVKIENSASQAATYVVMPMRL

SEQ ID NO: 5920 - protein, 462 aa, Xenorhabdus sp.
VSLSLWQQCLARLQDELPATEFSMWIRPLQAELSDNTLALYAPNRFVLDWVREKYINNINLLLNDFCGPEVPLLRFEVGNKPVSASQSTSQKIIADMPVVAAPSSLSVRPSWDNAKAQPELSYRSNVNPKHTFDNFVEGKSNQLARAAARQVADNPGGAYNPLFLYGGTGLGKTHLLHAVGNSIMARKANAKVVYMHSERFVQDMVKALQNNAIEEFKRYYRSVDALLIDDIQFFANKERSQEEFFHTFNALLEGNQQIILTSDRYPKEINGVEDRLKSRFGWGLTVAIEPPELETRVAILMKKADENQIQLPGEVAFFIAKRLRSNVRELEGALNRVIANANFTGRAITIDFVREALRDLLALQEKLVTIDNIQKTVAEYYKIKVADLLSKRRSRSVARPRQMAMALAKELTNHSLPEIGDAFGGRDHTTVLHACRKIEQLREESHDIKEDFSNLIRTLSS

SEQ ID NO: 5921 - protein, 193 aa, Xenorhabdus sp.
MPKVGIQSIRKQQLIDATLAVINEVGMQEASIAQIAKKAGVSNGIISHYFKDKNKLLEAAMRHLLHQLQMAVARRLRLLDNATPLHRLKAIIEGNFDTSQINSAAMKTWLAFWASSMHQPSLYRLQQVNERRLYSNSCVEFNRALPRREAQLAAQGLAALIDGIWLRSALSSKPFDVESAFTITFDYIEQKLR

SEQ ID NO: 5922 - protein, 492 aa, Xenorhabdus sp.
MTHFGLQKLYIHGAYVDSTHPDKNIFDAVNPANGEIIAQLQSATEQDVQLAVESAQKGQKIWAAMTATERSRILLKAVDILRERNNELAELETLDTGKPLSETQQVDIVTGADVLEYYAGLIPALEGQQMPLRESSFVYTRREPLGIVAGIGAWNYPIQIALWKSAPALAAGNAMIFKPSEVTSLTALKLAEIYTEAGLPDGVFNVLTGMGHEAGHYLAVHPKIAKMSFTGGITTGKKVMANASGSTLKEVTMELGGKSPLIIFDDANLDRAADIAMMANYFSSGQVCTNGTRVFVPKTLLPDFENKIMERVKRIRVGSPLDLNTNFGPLVSFPHMESVLRYIESGKNAGARLLYGGQRLMDGELAKGAFVAPTVFTDCTDDMLIAREEIFGPVMSILAYETEDEIIVRANNTDYGLAAGVVTNDLSRAHRVIHQLEAGICWINTWGESPAVMPVGGYKHSGVGRENGLVTLQHYTQTKSVQVELGNFESLF

SEQ ID NO: 5923 - protein, 571 aa, Xenorhabdus sp.
MTETEEITMVFDYIIIGAGSAGNVLATRLTEDPNITVLLLEAGGPDYRFDFRTQMPATLAYPLQGTRYNWAYETDPEPYMNNRRMECGRGKGLGGSSLINGMCYIRGNALDFDHWAKQPGLEDWSYLDCLPYFRKAESRDIGQNDYHGGDGPVSVTTPKADNNELFHAMVEAGIQAGYPATDDLNGYQQEGFGPMDRTVTPKGRRSSTARGYLDQARQRANLTIITHALTDTITFEGKTAVGVTFYQGNNSTLTQATAQKEVLLCAGAIASPQILQRSGVGPEEVLQESSIPAVHILPGVGQNLQDHLEMYLQYECLKPVSLYPSLKWYNQPMIGAEWLFKGTGVGASNQFEAGGFIRTSEKFDWPNIQFHFLPVAINYNGSNAVNEHGFQAHVGSMRSPSRGHVKIKSRDPRQHPSILFNYMSTEQDWQEFRDAIRITREIMAQPALAPYCGREISPGANIQTDDQLDAFIRERAETAFHPSCSCKMGLDEMAVVDGQGRVHGVENLRVIDASIMPEIITGNLNATTIMMAEKIADKIRGNAPLPRSQAKYYVANGAPARKSGLSSSSTN

SEQ ID NO: 5924 - protein, 676 aa, Xenorhabdus sp.
DSPKNTQKDSLNSVVFFTSAALIILFSLFTLFFTDATSIWIKNTLNWVSKTFGWYYLLAATLYIVFVIFVAASRFGAIKLGPEQSKPEFSLLSWAAMLFAAGIGIDLMFFSVAEPITQYMRPPTGEGETIEAARQAMVWTLFHYGLTGWSMYALMGIALGYFSYRYNLPLTIRSALYPIFGNRIKGPIGHTVDIAAVIGTIFGIATTLGIGVVQLNYGLKVLFGLPQGLGVQGGLILLSVIVATISVTSGVNKGIRFLSELNVLLALGLVLFILFVGDTEFLLNGLVQNVGDYISRFMGMTLNSFAFERPTEWMNSWTLFFWAWWVAWSPFVGLFLARISRGRTIRQFVMGTLIIPFVFTLIWLSVFGNSALYEIIHGNHELAETVLVHPERGFYNLLALYPAFTLSASVATITGLLFYVTSADSGSLVLGNFTSNLSDINNDAPNWLRIFWSVAIGVLTLGILMTDGISALQNMTVIMGLPFSFVIFFIMAGLYKSLRVEDFRKASALQNTSPTLVHDNGSLNWKQRLSRMMHFPGTKSTQRMLDMVCRPAMQEVAKELELRGASVQFNMLPSEEDKRLTPIELIVDLGDEQNFIYQIWPQRYSVPGFTYRARLGKSYYFRLETFLIEGTQGNDLMGYTKEQIISDILDHYEKHLNFIHLNRESPGQTLIFPNGV

SEQ ID NO: 5925 - protein, 145 aa, Xenorhabdus sp.
MKIKHSLGRQDPELIQHAFNVRKYVFTDEQGFADEIDIDEYDDIALHVVVFDAENPIAVLRAVPQHNDMLKVGRVAVLKAYRGQGIGRLVMEFIENYARKNGVATIGLSSQCHAQPFYESLGYQTKGEIYMEDGAEHIFMELDLL

SEQ ID NO: 5926 - protein, 155 aa, Xenorhabdus sp.
VAFIAGCDDAAKKAEDSTKPVEDSATQMKTDSEQNNLDTKEKPQGTQDNANHEDQKAVDNSKEGQSSTGSSTEKTISQLPSKTEDLKNDITKSVNDAADQLKNKTGEIQQQATDKINQLTDDAKSKSKEIKSEADKKTDDLINKIKGDDSKKEEG

SEQ ID NO: 5927 - protein, 222 aa, Xenorhabdus sp.
MLEYIKDILPGLHTSLSLTFTALLVAFMLSVILTVILTMKLPVLSQLVKGYITLFTGTPLLVQFFLIYYGPGQFPAIKAYPWLWQLMSEPWLCAMVTLALNSAAYSTQLFYGAVKAIPEGQWQSCYALGMSQAHSIRILLPYAFKRALSSYSNEVVLIFKSTSLASTITLLDIMGYSQLQFGRSYDATVFVAAGIIYLCINGLLTLLMRTFERRTLSFEQRN

SEQ ID NO: 5928 - protein, 78 aa, Xenorhabdus sp.
METGTVKWFNNAKGFGFICPASGGEDIFAHYSTIQMDGYRTLKAGQKVNFSVNQGPKGNHACVIVPLEDGSKLKKSNQ

SEQ ID NO: 5929 - protein, 257 aa, Xenorhabdus sp.
MGISLAMLDNLGSNLLSILLYAMTFFLCIFATNWLALFFLDKKEPWIITGHKQESPPSRLHMALDSIKLCGALIFGFLLGLTEWSWFNFAGKASEITLIFLLFFVGIQLRNNGLSLKQTFMNRRGAVVAIIVAISSLIGGMIAAFLLGLPTKTGLAIASGYGWYSLSGILISDAYGPVFGSTAFFNDLARELASIMLLPMLINRYRSTALGLTGAASIDFTLPILQRCGGISIVPAAIVHGFILSLMTPIFIAFFTQ

SEQ ID NO: 5930 - protein, 242 aa, Xenorhabdus sp.
MKIQLKNINCFYGINQALFDINFECGSGETVVLLGPSGAGKSSLLRVLNLLEMPRSGQLSVAKHQFDFKQPPNTKEIRALRQNVGMVFQQYNLWPHLTVMDNLTEAPCRVQRLSKQQSMEKAARLLSRLRLEEFANRFPLHLSGGQQQRVAIARALMMEPQVLLFDEPTAALDPEITSQVVNIIKELAETGITQIIVTHEVELARKTASQVIYMEKGRIIEKGDASHFLKPQTEAFAHYLSH

SEQ ID NO: 5931 - protein, 225 aa, Xenorhabdus sp.
ETLRFATEATYPPFEFVGDDNKIQGFDVDLADAMCKKLNAECSFTNQAFDSLIPSLKFRRVDVLMAGIDITPDRKKQVDFTDTYYDNSANFVTVKGKFSKIDELKGKLVGTQNGTTHQKYLMEQHKELQTVPYDSYQNAILDLKNGRVDAIFGDTAVVNEWLKKNKELGTIGEKVTDKDYFGTGLGIAVRKGNTDLLNKLNKALAEIRQDGTYDTIYEKWFGKNN

SEQ ID NO: 5932 - protein, 240 aa, Xenorhabdus sp.
MNEFQSLISAAGITVGLAVSSLIAGLILAMIFAGWESSRWKTFALLGSCWVTLIRGLPEILVVLFIYFGSSQLLIILSEGLDINLVVWQFRIQMEIDNFDVSPFLCGVIALSLLYSAYASQTIKGALKAIPIGQREAGQALGLSQSRIFFRLVMPQMWRHALPGLGNQWLVLLKDTALVSLISVNDLMLQTKSIATRTQEPFTWYMVAAIIYLVITLVSQFILKRLEVRATHFERSASDA

SEQ ID NO: 5933 - protein, 87 aa, Xenorhabdus sp.
MYTVIFGRPGCPYCVRAKELAEKLKTEREDFDYRYVDILAEGITKEDLSKTVGKTVETVPQIFIDETHIGGCTDFEAYAKENLELYK

SEQ ID NO: 5934 - protein, 398 aa, Xenorhabdus sp.
MLNQELELSLNIAFAKARDNRHEFMTVEHLLLALLSNTSAREALEACKVELAVLRQELENFITQTTPLLPENDDRDTQPTLSFQRVLQRAVFHVQSSGRSEVSGANVLVAIFSEQESQAAYLLRKHDVSRLDVVNFISHGTRKDELDNESHHNVNPVQEEQAIGEDRLENFTTNLNQSAQKGQIDPLVGRQHELERTIQVLCRRRKNNPLLVGESGVGKTAIAEGLAWRIVQKDVPAVMKDCTIYSLDIGSLLAGTKYRGDFEKRFKTLLKTLEQDSKSILFIDEIHTIIGAGAASGGQVDAANLIKPLLSSGRIRVIGSTTYQEFSNIFEKDRALARRFQKIDILEPSSEETVQIINGLRAKYEAHHDVRYTAKAIRAAVELSVKYITDRHLPDRAI

SEQ ID NO: 5935 - protein, 99 aa, Xenorhabdus sp.
LNLEEFIEDKEKQALQPPSMYKIILNNDDYTPMEFVVDVLQKFFSYDIERATQLMLDVHYQGKAICGIYTAEVAETKAAQVNMYAKEHEHPLLCTLEKV

SEQ ID NO: 5936 - protein, 377 aa, Xenorhabdus sp.
MQCAQYTAGHCHSCQWLDKSYLNQLSDKQEHLQQLLRDTPNTRWQPPVASQLSEFRNKAKMVVSGSVERPLLGMLHRDGRTVDLCGCPLYPQHFQPVFDVIKIFIAKAGLVPYNVARKKGELKYILLTESRADKEMMLRFVLRSEIKLEQLQRALPWLQEQLPQLTVISANIQPTHMAILEGEKEIIFTEKKMLKENFNNIPLYIRPRSFFQTNPAIASQLYMKAGQWVRELNIGSMWDLFCGAGGFGLHCADKETKLTGIEISEEAIACARNSADSLGLKHVEFQALDSTHFALEKSQTPELVLVNPPRRGIGKELCQYLNRMAPEYILYSSCNAETMAKDITMLERYRIEKVQLFDMFPHTEHYETLALLVLNNG

SEQ ID NO: 5937 - protein, 171 aa, Xenorhabdus sp.
MDSMVTPNLATLRNWLDKLKISYFENEASQVLHLPHMQNIEGLFDAKIDLLGDVVFFSALAEVRPTAIIPLVANLSQINASSLTVKAFLDIQDENLPKLIVCQSFPIAAGMTFQQFSHFLKLGEEQIANVIFEVHSNNFLYVTSDMENEMEVEDEEDEAQASTETSTFTLH

SEQ ID NO: 5938 - protein, 121 aa, Xenorhabdus sp.
VRYGQNLSPVSDLEGSQQMKKSISKEMRSLADMPKLVILLEILGIGLLALVYLSITDSLILSPLLMTTEAHVAMILLGIGCLIPAAIHIIWRAIYNLSFLGIDHKKEGSNHRVVSDGEKTK

SEQ ID NO: 5939 - protein, 221 aa, Xenorhabdus sp.
FDFPELSKSANEPVVLGPAGETFDFIRTGKQTCGKYLFAKLVVPAHVGPPPHVHHWTDEWFYAPNGGFVIFMGQNRYPDLQRAPGEGAPKDTLHIVKMRPKELFYGERYIVHGFANVTDEPQELYLVWTPDTPDVSILPYFLNAGTIRNPSKPDQKPDLMSSIRLVSMAPKYGINQSSSFWQYVEKVVEIDHGHDMPDNREKLLELLASKNDCRTDGGPTK

SEQ ID NO: 5940 - protein, 58 aa, Xenorhabdus sp.
MGFQVIASAFIAYVGDGKQFNNGRQLAAWLGLVPRQASSSGKAQLTSVLFKHPNSRIM

SEQ ID NO: 5941 - protein, 60 aa, Xenorhabdus sp.
MGERKMKISDVLRETGLSRNTVTLMYKESAQKIDIEALDKLCRLFECEVADMLEFTDVQG

SEQ ID NO: 5942 - protein, 288 aa, Xenorhabdus sp.
MKFFAIISGELIVLFLIVSFIVAMMQEYVPASTVQRLLTGRGLRGNIVGAGLGTVTPFCSCSTIPVTVGLLNAGAPFGATMSFLISSPILNPVILGLLVTLFGWKFTLFYAISTFILAVVVGVVWQFFGLEKDIKKVRVVGEADILKSTDFKSRLFRAGHSAFSLFKTSLPYLLIGAGIGSLIYGVVPGEWIANVAGADNPFAVPVAAAIGVPLYIRAETLIPIGMALQAQGMSIGAVAALIIAGAGASIPEVTLLNTIFRPRLVSIFVLTIFTVAIGVGYIANLLFM

SEQ ID NO: 5943 - protein, 116 aa, Xenorhabdus sp.
VKRVPVDYTDRLYWNGIIKMSLSKFFILSVLRNRPMHGYEIAREVECSTKGCCAPTEGTIYPVLREFEQGNYVTVHTETVAGRGRKVYTLTEKGNEAFAVAVEAWLEVTAHITRQK

SEQ ID NO: 5944 - protein, 94 aa, Xenorhabdus sp.
MAGAMSMFTQGFEGELFNQPGTPWPEVDVTLIDLGTLARENYSAQMALAMVSLINTVNIHSAKNLIYSSFVIRPTKSNYLIINLLIEIMAIIAI

SEQ ID NO: 5945 - protein, 265 aa, Xenorhabdus sp.
MAITIKTDEDIQKMRVAGRLAAEVLEMIEQHVKAGVTTGELDRICHEHITNKQQAISACLGYHGFPKSVCISVNDVICHGIPSDDKVLKDGDIVNIDVTVIKDEFHGDTSKMFIVGKPTIQGERLCRVTQESLYLALKMVKPGIRLRTIGKAIQQYVEGNDFSVVREYCGHGIGRVFHEEPHVLHYDADDGGVVLQKGMAFTIEPMVNAGDYRIRTMKDGWTVKTKDRGWSAQYEHTIVVTDNGCEIMTWRKEEEAQISAVLVNA

SEQ ID NO: 5946 - protein, 874 aa, Xenorhabdus sp.
PIPPVSPVEFSCDDLQCPVLKQHIDEFQLWLEQAFKAGISPTALIYARSDYIDKLLTRLWQQYGFDQIDTLSLIAVGGYGRRELHPLSDIDLLILSEHPLTEEQSTQIGRFIALLWDIRLDVGHSVRTLEECLEKGLSDLTIATNLVESRLICGDLPLFLRLQKHIFSDDFWPSAQFFASKLTEQKNRHQRYHSTSYNLEPDIKSSPGGLRDIHTLLWVAHRHFGATSLDEMVDFGFLTHEERDELNECQNFLWRIRFALHLSVTRYDNRLLFEQQFSVAQLLGYKGEHNQPVERMMKDFYRVTRRVSELNDMLLQLFDEAILTLQPDEKPRPLNEAFQLRGDLIDVIDESLFTRDPASILSMFYHMAVHREINGIYSTTLRQLRYARRNLKQPLCELPQARKIFMAILRHPHAVKSALLPMHRHSVLSAYTPLWSNIVGQMQFDLFHAYTVDEHTIRLLQKLESFADENNRILHPVCVELYPRIPQPEILRLAAFFHDIAKGRNGDHSELGAKDAFTFAKQHGLTTYEAELIEWLVRYHLLMSITAQRRDIQDPEVIQQFACQVKNQNRLNYLLCLTVADICATNAKLWNSWKQSLLRELYFATETQLLKGIQNTPDLRERIRHNRLQALALLRQEAIDEERLHNIWSRCHANYFLRHTPDQLAWHASHLVNHQYPDPMVLISTSFSHGGTEIFIWCQDRPSLFAAVVGELDRRNLSVHNAQIFTNRDEMAMDTFVILDPNDHSLAPDRHEPIRQSLLKAINDPHPKAPKTRKLPAKLRHFDVPPKISFLTTQNTRRTYMELVALDQPGLLAKVGSIFAELGISLHGARITTIGERVEDFFVLTDKDYLALDKKIKDELSERLTEALNTKDKV

SEQ ID NO: 5947 - protein, 272 aa, Xenorhabdus sp.
ELMGIIENAFENRTSITPATVDETTRDAINQVIQMLDSGKLRVAEKIAGEWVTHQWLKKAVLLSFRINDNQVMEGAESRYFDKVPMKFADYDQARFEKEGFRVVPPAAVRQGAYIARNTVLMPSYVNLGAYVDEGTMVDTWATVGSCAQIGKNVHLSGGVGIGGVLEPLQANPTIIEDNCFIGARSEIVEGVIVEEGSVISMGVYIGQSTKIYDRETGEIHYGRVPAGSVVVSGNLPSKDGSYSLYCAVIVKKVDAKTRGKVGINELLRTID

SEQ ID NO: 5948 - protein, 96 aa, Xenorhabdus sp.
MATNAKPVYQRILLKLSGEALQGAEGFGIDASVLDRMAQEIKELVELGIQVGVVIGGGNLFRGAGLAEAGMNRVVGDHMGMLATVMNGLAMRDALH

SEQ ID NO: 5949 - protein, 285 aa, Xenorhabdus sp.
MADITAALVKELRERTGAGMMECKKALVEANGDIELAIDNMRKSGQAKAAKKAGRVAAEGVILVEVSADAKFAGIVELNCETDFVAKDAGFLAFGKEVITSVMADKNSDIDALKAKFEEQRTELVAKIGENINIRRVAILEGEAVGSYLHGARIGVLVAAEGASEELIKHVAMHVAASKPEYVDPSDVPADVVAREHQIQLDIAMQSGKPREIAEKMVSGRMNKFTGEISLNGQNFVMDPSKTVGALLKENNAKVINFIRFEVGEGIEKVEADFAAEVAAMSKQS

SEQ ID NO: 5950 - protein, 241 aa, Xenorhabdus sp.
MATVSMRDMLQAGVHFGHQTRYWNPKMKPFIFGARNKVHIINLEKTVPMFNEALAELNKIASRKGKILFVGTKRAASEAVKEAALGCDQYFVNHRWLGGMLTNWKTVRQSIKRLKDLEAQSQDGTFDKLTKKEALMRSRELGKLENSLGGIKDMGGLPDALFVIDAEHEHIAIKEANNLGIPVFAVVDTNSDPDGVDFIIPGNDDAIRAVKLYLTAAATSVREGRSQDLAVQAEEGLVDAE

SEQ ID NO: 5951 - protein, 108 aa, Xenorhabdus sp.
LLGHSAKGLEYALPTIGGAAGRGNRHDQPFDIVAPGDLVEPFQKFGIVLDQTGNLDTGNVWSGALLRPVPQKPVEAEGAGDEQENSGNPPESQLAAQSPAIRYRHIIH

SEQ ID NO: 5952 - protein, 343 aa, Xenorhabdus sp.
MFTRFKSHFTRSPALQKKSSGQKTSGACDNGDYFRPQSVEALLATPLRHQCLQQLWQNSTLSEGLYQRFYLAPIKQLLGSVQQIPAAPEGKWSGRGGFADLTLQFTTCAVRLAKGHLLPPGVAPETQAAQGVLWQAVVFWAALFYHLPLLRQLEGELEDGQVWQPGIGIPDKPFRFRFRAPENIPSAPQEVLLAVCLLPEKAMMWLVTVPEVWHCLMQHLNGRPSSVPLIDTLLQDAAGQVQSPLWVKQAVSPSPVKEAAASSEGNPVPETISTPPVSEITTPSPSVSDDTLTLLSLFQSPNASSPQNQGKNHHHGSKLTKQPGREKESIATDSHPYSSFKGK

SEQ ID NO: 5953 - protein, 227 aa, Xenorhabdus sp.
MASRSDYQKDFISLFKQTARYCNRYRVFQDFCNCAMAAIHNKYCFSEELEQFYLKTINKYEREDIDRIVELFSTTVLALAEDPGDFLGSVFMQLELGNKDLQQFFTPWSVARVMAQLQLNEVSDLLQTRPFITFHEPCCGAACMMLAAAEVLREQGHDPLSSMWVSAIDIDPLAAVMAYIQLSLTGIPAAVTIGDALHDGGSQRTRYTPAHYLGNWSQRLQAYDQAA

SEQ ID NO: 5954 - protein, 307 aa, Xenorhabdus sp.
MAEWVTNQLEVTGKSVCLDVMQQWVCGEEVPRYRQAVLQGLRLFLAGCAGILKPTKPLTYTPYPELVRGTAAPTAQNLAFEQWLVLLQDNVPLNSDNIKRIDNLYRQSGLSLLRWEHVPVPARDIIARLLTRQYTDWFGMVSWSETPDISVCWDKLNTYPATAQPCDMLMMMPTRLAYEINGNSGLLKGIASTVQFYGEQYGLEWPFGHHVRWERRHVSSLTVRFDTPWAAPSAELMGELSSVFDCEIRHWYSEPSGSLKGYDCYDQGEHVDSHNGQVGHENRPALYLVNGEKTEPALALPAMAVGQ

SEQ ID NO: 5955 - protein, 85 aa, Xenorhabdus sp.
VLGSRFYDEIVWAQPVTVTSERLSLVQKQQRLCQSATFELSWQNTGAARVLWHEANLLSLHVVSPRYQHHHEVQDILRHSTTLSV

SEQ ID NO: 5956 - protein, 124 aa, Xenorhabdus sp.
FLANTAFKLGGNYQPDYWTIQSIDDRLAYMVPTAKKMYSVFLPETAFSVTLSAEAFGLAVTSVLLTRIAVLDESGATAFRFSALREYAQHHPEAGLINSAFSLKFEEDIVCPSFIHTQHNNNPQ

SEQ ID NO: 5957 - protein, 30 aa, Xenorhabdus sp.
DGGGGRIRTFEVCDGRFTVCSLWPLGNPTK

SEQ ID NO: 5958 - protein, 216 aa, Xenorhabdus sp.
CSKDDALPTGSSRELNTAGRRRIVIMVTKEAHCIGDILVKSAYEGLDVEIAAVIGNHTTLQSLVEQFGIPFHHISHESLSREQHDEALMAQIDQYNPDYVVLAKYMRVLTPAFVQHYPNQIINIHHSFLPAFIGARPYHQAYERGVKIIGATAHYVNDNLDEGPIITQDVINVDHGYTAEDMMRAGRDVEKNVLSKALHSVLSQRVFVYGNRTVIL

SEQ ID NO: 5959 - protein, 268 aa, Xenorhabdus sp.
MKFISFNINGLRARPHQLAAIVEQHQPDVIGLQETKVHDEMFPLEEVSQLGYHIFYHGQKSHYGVALLTRQQPTAVRKGFPTDDDDAQRRIIMADIETPSGLLTVINGYFPQGESRNHEIKFPAKEKFYQDLQTYLETNQSPGSNILIMGDMNISPTDLDIGIGENNQKRWLKTGKCSFLPEEREWMERLKNWGLVDTFRAHHPEISDQFSWFDYRSKGFNDNRGLRIDLLLASQPLAEKCLSAGIDYDIRAMEKPSDHAPVWAEFKI

SEQ ID NO: 5960 - protein, 632 aa, Xenorhabdus sp.
MHTLWKLIAGLLKWSWKLLNFARQFISNLLFILFIVLVATGVLIYKEQFPADDSDYGGALYVNLSGTIVDRVSARNPLDQLGWDLVYPSSGRIQQTSLFDIVDSIRRAKNDTKITGMVLKLDDFAGADQASMLYIGKVINEFKSSGKSVTAIGQSYSQPQYYLASYADKILLTPQGSVSLKGYSNNHLFYKSLLENLKISTHIFRVGTYKSAVEPMMRNDMSDAARAADSLWLNELWNNYRQDIAANRKIPISQVLPEPSVFIEKLRKAGGNSALYALQNGLVDRIAPLNVIEQKLEKKFGWDKKNQHFNYITINDYIAKKPIEDAYQNDGNIAVIVVEGEIMDGKQSGSIAGSDTIAEQLRQARLNPNIKAIILRVNSPGGSISASELIRSELVAIREGTDVNGKKINQKPIVVSMGGLAASGGYWVSTPANYIIASPNTLTGSIGVFGAITTFEKSLDYLGVNTDGVSTYPLADISTTKGLNPLFSEVIQMSIENGYSQFIGLVANSRHKTTAEIEKIAEGRVWSGSDAKKNGLVDQLGDFDDAVKKAAELAGLKTVSLSWMQPELSFTEKLMLEFSSSAQAIMPNTLQSMLPAPFAQAAQDMKKQAVFYNRMNDPQNIYAYCLNCSDIR

SEQ ID NO: 5961 - protein, 135 aa, Xenorhabdus sp.
MQKKSIYVVYTGGTIGMQHSPNGYIPVSGHLQRQLTKMPEFHRPEMPTFTIREHHPLIDSSDMSPDDWGIIASDIYQNYHDYDGFVILHGTDTMAFTSSALSFMFENLNKPVIVTGSQIPLEALRSDGQTNLLNA

SEQ ID NO: 5962 - protein, 262 aa, Xenorhabdus sp.
MNRTTPPVAKSIKDFEATLGKRLFKREKFGMILTKDGADLYNDLKELYLKEKEITKKHFSGTICNSVNIYYDWGKDRHLISLYKAADRNNAQVNILRFSYDNIDEIVDYEGNTIILSSEKILSDRFSLVRKIEGQNLGVCCRQELIDESNGDLTQLLKNKTWLCDPVLYKSDFIKNLEEDMQKNGEKANIRQMDNMECCLNFIQSKDYIFITDARYGALEEGKSLGFIPISRADAVNQCYVYKSKSHSSVLNRFIDSVSDME

SEQ ID NO: 5963 - protein, 642 aa, Xenorhabdus sp.
MRLFIAEKPSLARAIADILPKPHRRGDGFIECGDSQVVTWCVGHLLEQAEPDVYDRRYARWVLADLPIIPEKWQLKPREAVAKQLNTIKSLLARADEIVHAGDPDREGQLLVDEVLDFLQLEDNKKQNVQRCLINDLNPQAVLKAVERLRSNREFIPLCVSALARARADWLYGINMTRAYTLLGRNAGYQGVLSVGRVQTPVLGLVVRRDEEIEHFIPKDFFEVKAHIITPKEERFTAVWQPSESCIDFQDEEGRVIHRPLAEHVVMRIMGQPAYVAAYQDKRESETAPLPFSLSSLQIEAARRFGLSAQDVLDICQRLYETHKLITYPRSDCRYLPEEHFAGRQAVLNAISVHASHLLPQDALDTEKKNRCWDDKKVDAHHAIIPTARSSQVKLTENEQHIYGLVARQYLMQFFPDAIFRKCTIELDIAGGKFIAKARFLAEAGWRTLLGNKERDEENEGTPLPIVAKGDELLCEKGEVVERQTQPPRHFTDATLLSAMTGIARFVQDKALKKVLRATDGLGTEATRAGIIELLFKREFLYKKGRYIHATPAGCALIHVLPDMAVLPDMTAHWESKLTQISEKQFRYQDFMSPLHETLQQLIWQAKQYRNLKAFRDLPPAPVKGKKSKGKQAKTKQTNKAE

SEQ ID NO: 5964 - protein, 183 aa, Xenorhabdus sp.
MKALELLLNRRSVSRLTTPVPAGDELQNILAAGMRAPDHGALRPWHFIVMQGEGIDKFSKLLEQAAINGEMGDDVAEKAKNAPYRAPMIITVIAKVVEHVKVPEWEQVVAAGCAVHAMQMAAVAQGFGGIWRSGSWTEDLTVRAGLGCEEHDKIVGFLYLGTPELKSPMKVSSPDLTDFVSYF

SEQ ID NO: 5965 - protein, 65 aa, Xenorhabdus sp.
HSNLLEALEQGKVQIEYQCREGYCGSCRVRLLKGKVGYPCKPLAFVNEGEILPCSCYPLSDIEIE

SEQ ID NO: 5966 - protein, 158 aa, Xenorhabdus sp.
ALLCKKGINKNCGPVMYEPQSVEGPKGFPEAGPPDGQIASAGVGQFKQLNEQSADRWHHVPVNKGQNTFKWHLTARHSTTSWQFFITKPDWDPNKPLARAQFDLTPFCSQEDHGKRPEQEVNINCEVPDRSGYHVILGVWTIADTSNAFYQVIDADIK

SEQ ID NO: 5967 - protein, 81 aa, Xenorhabdus sp.
MKNKQITIEQAKEFFCDGMTIMVGGFMAVGTPPHLVTALFDTGVKDLTLITNDTALVNIGLGPLIVNGRVKKVIASHIGTI

SEQ ID NO: 5968 - protein, 255 aa, Xenorhabdus sp.
YKIDYNSYRSIKSFNRRPRFLVMHYTALNFEKSIEALTGEGVSAHYLVPNPDDPTYKAAGFDSIRIFNLVDEPERAWHAGMSSWSGRNNLNDTSIGIEIINEASDNCGVITFPPYHPEQVNAIKELVINILQRYPDITPTHVIGHSDIAVGRKSDPGPAFPWKELYEAGVGAWYDEEVKQKYIKKFNQSFPDRANILEKFSQYGYDVPDLNDNDGFKNLIKAFQMHFRQSNYDGISDIETIAIIYALVEKYFHKA

SEQ ID NO: 5969 - protein, 376 aa, Xenorhabdus sp.
MSYTTFSQVKNDQLQEPMFFGQPVNVARYDQQKYPIFEKLIEKQLSFFWRPEEVDVSRDRIDYNALPDHEKHIFISNLKYQTLLDSIQGRSPNVAFLPLISIPELETWVETWSFSETIHSRSYTHIIRNIVNDPAVIFDDIVTNEQILKRAQDISKYYDDLIEMTNYYHQLGEGTYNVAGQEITVSLRALKKQLYLCLMSVNALEAIRFYVSFACSFAFAERELMEGNAKIIKLIARDEALHLTGTQHMLNLLRSGQDDPEMAEIAQECEQQCYDLFVQAAEQEKEWAEYLFKDGSMIGLNKDILSQYVEYITNIRMQAVGLKLPFEIRSNPIPWINSWLVSDNVQVAPQEVEVSSYLVGQIDSEVNTEDLSGFEL

SEQ ID NO: 5970 - protein, 835 aa, Xenorhabdus sp.
LVPCALKLVHLIKCEINIILLLQFYLPPIYCVSGRFTATSSQLAFSLLGGIVLSTDRKNNSRRDTKKKVYFLMNQSLLVTKRDGHKEQIDLDKIHRVVAWAAEGLKNVSVSQVELRSQIQFYDGIKTSDIHETMIKAAADLISGDAPDYQYLAARLAIFNLRKKAYGQFEPPALYDHVVRMVDLGKYDKHLLEDYSKEEFEQMDSFISHLRDMDFSYAAVKQLEGKYLVQNRVTGEIYESAQFLYVLVAACLFSTYPKETRLDYIRRFYDAVSTFKISLPTPIMAGVRTPTRQFSSCVLIECGDSLDSINATSSAIVKYVSQRAGIGVNAGRIRALGSPIRGGEAFHTGCIPFYKHFQTAVKSCSQGGVRGGAATLFYPMWHLEVESLLVLKNNRGVEGNRVRHMDYGVQINKLMYERLIKGQDITLFSPSDVPGLYDAFFADQDEFERLYTQYENDSNIRKERIKAVELFSLMMQERASTGRIYIQNVDHCNTHSPFDPAIAPVRQSNLCLEIALPTKPLDNITDENGEIALCTLSAFNLGAIENLSELEELADLAVRALDSLLDYQDYPIVAAKQGSMGRRTLGIGVINFAYYLAKNGVRYSDGSANGLTHKTFEAIQYYLLKASNKLAKEQGACPWFGETTYSRGILPIDTYKKSLDTLTSEPLHMDWEALRSDILQYGLRNSTLSALMPSETSSQISNATNGIEPPRGYVSIKASKDGILRQVVPEYDRLKRSYELLWQMPSIDGYLQLVGIMQKFIDQSISANTNYDPARFPNGKVPMNQLLKDLLLAYKYGVKTLYYHNTRDGAEDAQDDLEEVVESADSDCEGGACKI

SEQ ID NO: 5971 - protein, 149 aa, Xenorhabdus sp.
MHCPFCAAVDTKVIDSRLVGDGSQVRRRRQCLECHERFTTFEIAELVMPRVIKSDDVREPFDEEKLRRGMQKALEKRPVSSDDVETAISHIKSQVRATGEREIPSKMIGNFVMDALKKLDKVAYIRFASVYRSFEDIREFGEEIARLQD

SEQ ID NO: 5972 - protein, 379 aa, Xenorhabdus sp.
MTLDETYMSRALELAYQGRFTTSPNPNVGCVIVKDDQIVGEGFHLRAGEPHAEVHALRMAGEKAKGATAYVTLEPCSHHGKTPPCSDALIAAGISRVVVAMQDPNPQVAGRGLYKLQQAGISVEHGVMMEQTEMLNKGFLKRMRTGFPYLQLKLGASLDGRTALASGESKWITSPAARQDVQKLRAQCSAILSSSATVLADDPSLTVRWNELDAETQAVYPQEALRQPVRIIVDSKNRITPQHQVVQQTGQCWLAHTDLDGSDSANSADKNEQQWPDNIEKILLPVHGTGVDLVLLMMQLGKRQVNSVWAECGPTLAGALLSLGLVDELILYIAPKVLGNSARGLFAIPELQKLSDAPEFTLIDVQQIGPDVRLRLKPL

SEQ ID NO: 5973 - protein, 138 aa, Xenorhabdus sp.
VKPAARRRARECAVQAIYSWQLSKNSIADVELQFLSEQDVNGVDVTYFRELLSGVAVNATKLDALMAPYLSRQLEELGQVEKAILRVAMFELSFRDDVPYKVAINEGIELAKTFGAEDSHKFVNGVLDKAGPVARKKK

SEQ ID NO: 5974 - protein, 348 aa, Xenorhabdus sp.
MACGEFDLIARYFNRHVIRRRDVNLRIGDDWALMTVAEKQELAVTTDTLVSGVHFLPNIAPEDLAYKALAVNISDLAAVGADPAWASLALTLPSVDEEWLKRFSDSLFEQLNYYGMQLIGGDTTKGPMSLTLTVHGLVPAGRALRRTGAKNGDWIYVTGTLGDSAAGLALLQDRLKIEEVSIHNWLVKRHLRPQPRVLQGQALRDLASSAIDLSDGLISDLNHILTASQCGARINLDALPYSEAVQKYATPEQALNWALSGGEDYELCFTVPELNRGALNMALAHTGASFCCIGQIRPESEGIRYFNNNEEVELDLKGFDHFRTDKKPQEAHYPSEHAEDDQTEGTHG

SEQ ID NO: 5975 - protein, 98 aa, Xenorhabdus sp.
VICQKAADAMKVDDPGCVVWDEFIGMWITLMAIPVLNWQWVLVAFVVFRIFDMWKPWPIRWFDRYVKGGVGIMLDDIIAAIFAVIVIWLLNFYQLLPF

SEQ ID NO: 5976 - protein, 265 aa, Xenorhabdus sp.
RKNLAHKNYAVRYIAGQPVERVFPTSTRLLEEALLPCGEPFFADNNVFSVAIWNIHKQQRPRWQSVLSSLIEKSDLILLQEAQTTPDLLKFITASGLVADQVPAFAIPQHPSGVMTLASSSPIYCCPLREKEPILRLSKSSLITMYPLADEQQLMVVNVHAINFSLGVDVYSRQLDNIGIYIKLHDGPVIFAGDFNAWSRRRFRVLEHFAQRMGLKEVYFNDDHRTIVFGKPLDFVFYRELTVQSATVLTTIASDHNPLLVRFSL

SEQ ID NO: 5977 - protein, 223 aa, Xenorhabdus sp.
MIYPINEMFQTLQGEGVFTGVPAVFIRLQGCPIGCSWCDTKHTWEKEADKQQSMENILVKSQDSDTWGAATPEQIINLFTRQGYTARHIVITGGEPCLYDLRPLTEALENAGYQCQIETSGTHAIHCTDKTWVTVSPKVKMRGGYKVLPEAMNRANEIKHPVGRERDIESLDDLLTMLDENNRPVIALQPISQKEEATRLCIETCIARNWRFSMQTHKYLNIA

SEQ ID NO: 5978 - protein, 223 aa, Xenorhabdus sp.
MTAKPPSTALLPVSQEQLSRLQSEVSDFSGHQLAWLSGYFWGMLNSQPQTNTVASVSGIPETEQETVTLISASQTGNARRLAEQLRDALLAQNLSVNLVNAGDYKFKQIAKERVLIIISSTQGEGEPAEEAVALHKYLHSKKAALMKETAYAVFGLGDTSYEHFCQSGKDFDRRLSELSAQRLLDRVDADVEYQDIATQWCQQLTDILKQRLPSQANTAIATT

SEQ ID NO: 5979 - protein, 461 aa, Xenorhabdus sp.
MQDNENQLKQGLSVRHIRFMALGSAIGTGLFYGSAAAIQQAGPAVLLAYLIGGAAVFMVMRALGEMAVHHPVSGSFSQYASHYLGPLAGFLTGWLYVLEMLFVCLADITAFGLYMKFWFPDVDQWIWVLSIVCFIGALNLCHVKIFGEMEFWLSIVKVTAIIAMIIGGLAIMIFGFGQTTEHATGIANLWEHGGFMPNGISGVVASMAIVMFAFGGIEVIGITASEAKDPAKTIPKAINAVPFRILIFYVLTLCILMCIYPWDQIGQNGSPFVQIFSDLKISAAAHVLNVVVITAAISAINSDIFGAGRMMYGMAQEGQAPEAFKKLTRNGVPWMTVLVMIVVLLLGVMLNWLLPGNIFILIASVATFATVWVWLMILLSHVAMRRKMSAEEIRTLKFPVPMWPIAPIITIAFMGAIILLLGYFEQTRDAIYIGAGWVIILTIAYFFSIKKKLATSHRASQ

SEQ ID NO: 5980 - protein, 121 aa, Xenorhabdus sp.
IMSTTIFKDFQFEAAHRLPHVPEGHKCGRLHGHSFMVRLEITGEIDPHSGWLMDFADVKAIFKPIWERLDHHYLNEIPGLENPTSEVLAQWIWRELQPALPQLSAVMVKETCSAGCIYRGE

SEQ ID NO: 5981 - protein, 355 aa, Xenorhabdus sp.
MNFNEDNAFPNKLIQLAKISKNDVFDKFGSEVFQKVVYDVLTGKNVREFTEGLTRTRLLESNLSLLSFYIKEMEKGNYPKSLYMSAKNALIEKEYKNKYKPALEWLVMMTNKQTQNVLRDAHDDGFGRLTERTQEQIMETIKEYSETINNIKINDIDVPLEDFCYMLLSLGSQTLTIRGSEKSLHGKYFEKLILGSLFTILGFEYTKNLEENLDNKCFTLSLRSDDRESDATVLFNRKIIRVDIGFIGRGNTEISLDKVSRFRRIDDIGGIRHNVSTMVIVDVIGEGSRISDMAEEIDGKIEAMFSPYWVKKVANHVSEKLGVENVFNGCETLRDVQNKISQRLKLVDFEKFIQM

SEQ ID NO: 5982 - protein, 371 aa, Xenorhabdus sp.
YAKRKYLVISVENAKSIARNYLNSNELSQKFSFGLPEVDDRYHVWRVPLTLDNIRVGEIVINAKTATIDLEKSSNIDFLFRKSTEVIKREPKKRNRTKKIELSPLENTILAGNSVNTMKHLPDESINLVFTSPPYYNAKPEYSEYHTYEEYLELMRKVIKESHRILSEGRFFVINVSPVLIRRASRNEASKRIAVPFDLHAIFTSEGFEFIDDIHWVKPEGAGWAFGRGRRFAADRNPLQYKPVPLTEYLLVYRKKSDKLIDWNIRSHPNKQDVIDSKIDDDYERTNLWKINPSRYKKHPATFPFELAEKVVKYYSFKNDVVLDPFAGSGTTAKAAISLNRRFVMCEISDKYVELIREETLLAGKVNIVKE

SEQ ID NO: 5983 - protein, 61 aa, Xenorhabdus sp.
MLILTRRVGETLMIGDEVTVTVLGVKGNQVRIGVNAPKEVSVHREEIYQRIQAEKSQPTTF

SEQ ID NO: 5984 - protein, 875 aa, Xenorhabdus sp.
MSKSTAEIRQAFLDFFQTKGHQIVPSSSLVPTNDPTLLFTNAGMNQFKDVFLGLDKRPYTRATTAQRCVRAGGKHNDLENVGYTARHHTFFEMLGNFSFGDYFKQDAINYAWELLTGAEWFNLPKEKLWVTVYETDDEAYELWSKEVGVPTERIIRIGDNKGAPYASDNFWQMGDTGPCGPCTEIFYDHGEHIWGGPPGSPEEDGDRYIEIWNIVFMQFNRHADGTMEPLPKPSVDTGMGLERLAAVLQHVNSNYEIDAFRDLIASVAEVTGATDLTNKSLRVIADHIRSCSFLICDGVIPSNENRGYVLRRIIRRAIRHGNMLGAKETFFYKLVAPLIKIMGAAGEELQRQQALVEQVLKTEEEQFARTLERGLQLLDEELAKLSGNTLDGETAFRLYDTYGFPLDLTADVCRERDIKVDEKGFESAMENQRRRARESSGFGTDYNDVIKVDGQSEFSGYDHDSQQASVTAISRNGEEVDHLNAGDEAIIILDKTAFYAESGGQVGDTGKLSGTEGVFEVTDTQKYGQAIGHIGKLISGSLTVNTAVNAEVDVARRNNIRLNHSATHLLHSALRQILGEHVSQKGSLVNDKYLRFDFSHFEAMKPEQIRLVENLVNEEVRKNSSIITDVMDLEEAKTKGAMALFGEKYDEKVRVLSMGEFSTELCGGTHAGHTGDIGLFRITSESGTAAGIRRIEAVTGQTALNSIYQQTDLLQDIAYLVKGDINSLNEKVKATLDRTKQLEKELQQLKSQQAAQESTSLANKAKDIQGVRLLVTQLGDVEPKMLRTMVDDLKNQLGSAIIVLSTVTGDKVTLIVGITKDLTARIKAGDLISFVAQQVGGKGGGRPDLAQAGGTDVAALPSALDSVEEWVTLRL

SEQ ID NO: 5985 - protein, 358 aa, Xenorhabdus sp.
MANDENKQKALAAALGQIEKQFGKGSIMRLGENRSMDVETISTGSLSLDIALGAGGLPMGRIVEIYGPESSGKTTLTLQVIAAAQREGRTCAFIDAEHALDPVYAKKLGVDIDNLLCSQPDTGEQALEICDALSRSGAVDVIVVDSVAALTPKAEIEGEIGDSHMGLAARMMSQAMRKLAGNLKNSNTLLIFINQIRMKIGVMFGNPETTTGGNALKFYASVRLDIRRTGSVKNSDEVVGTETRVKVVKNKVAAPFKQAEFQILYGEGINTYGELIDLGVKHKMVEKAGAWYSYNGDKIGQGKANATNYLKEHPEIASELDKKLRELLLNNAGGFSSAAEDYVTDYEDNAEEVNNEEF

SEQ ID NO: 5986 - protein, 167 aa, Xenorhabdus sp.
MDEKILNQLSIELGKRLRQKNLSITCAESCTGGWVAKVITDVARSSAYFDRGFVTYSNDSKCEMLGVSPISLAELGAVSEQVVKEMALGALDAAKADFAVSVSGIAGPDGGSKEKPVGTVCFGFAVRDGTKRYTKSYRRLFTGDRNSVRLQSVIFSLKTLLEEIIKN

SEQ ID NO: 5987 - protein, 398 aa, Xenorhabdus sp.
MNGTVETQPLLNRGMKAVLLSQFLSAFADNALFFAILAQLKAESYPGWSLPALQMVFVLTYIVCAPFVGQIADRFPKGRVMLFSNGIKLLGAISICIDMNPFLGYTLVGIGAAAYSPAKYGILGELTDGSHLVKANGLMEASTIAAILTGSVVGGFLSDINLFLALGICALMYSAAVIANFYIPRLAAARQGKGWDLKAMLQDFISVISSLWNNSETRFSLVGTSLFWGAGVTLRFLLVAWVPVVLGVEGNTTPTLMNAVVAIGIIAGAGLAARFITLSTVRRCMPAGIFIGVIVIMFVVQHSIWHSYLFLIMIGLCGGLFVVPLNALLQEHGKHEMGAGKAVAVQNFGENSAMLIMLGLYLISTMLQISVITIGIGFGILFSLAIGGLWIWDLLRKN

SEQ ID NO: 5988 - protein, 675 aa, Xenorhabdus sp.
DGLLIGLFLPGKPVFAIYSNIAIKGFLKFIKPFADVVPLDPNNPMAIRTLVKEIDKGRPIVIFPEGRITVTGSLMKIYDGAAFIAAKSDAKIVPIRIDGAEQSVFGRLRGVMKQHWFPKVTIQILPAMDFPMPDAPDSNSRRRLAGEKLHAVMMDVRMQTRPKETLFSAYLAAQKRFGRFKPCIEDIALKEDSYHTFLKKILGFSRILERFTQEGERVGLLLPNATAMATTIYGTSLRGRVPALLNYTAGSSGIKNAIQAATIRTIITSRQFLEKSQLTHLPDQVTEANWVYLEDLKETITWEDKLWVLWHLIFPAKAALPSQKPEDDALILFTSGSEGAPKGVVHSHASLLANVEQIKTIADFTPQDRFMSSLPLFHAFGLTVGLFTPLMSGSRVFLYPNPLHYRVVPEVVYDQNCTVLFGTSTFLGNYARYAHPYDFSRLRYVVAGAEKLSEETKRVWQDKFGIRILEGYGVTECAPVVAINVPMAAKVGTVGRILPGMETRLLPVPGIDVGGRLQVRGPNLMKGYLRVEAPDRLEPPTAEDAEGNIQTGWYDTGDIVSIDEEGFCTIKGRVKRFAKLAGEMVSLEAVEQIALRVSPEALHAVTAKGDRSKGEALVLFTTDTVLNRSVMLLTARQIGLPELAVPRDIRYVKQLPLLGSGKPDFVTLRKMAEQE

SEQ ID NO: 5989 - protein, 465 aa, Xenorhabdus sp.
CPKDILVGNVTPKGETQLTPEEKLLRAIFGEKASDVKDSSLRVPNGVSGTVIDVQVFTRDGVEKDKRALEIEEMQLRQAKKDLTEELRIFEAGLFARIRTALVAGGIEAEKLDKLPRERWLELGLADEDKQNQLEQLAEQYDELKAEFEKKLDAKRRKITQGDDLAPGVLKIVKVYLAVKRQIQPGDKMAGRHGNKGVISKINPIEDMPYDENGTPVDIVLNPLGVPSRMNIGQILETHLGMAAKGIGDKINAMLKQQQEVAKLREFIQKAYDLGDDTRQKVDLNTFTDDEVMRLAENLKKGMPIATPVFDGAKETEIKELLKLGGLPTSGQITLFDGRTGEQFERQVTVGYMYMLKLNHLVDDKMHARSTGSYSLVTQQPLGGKAQFGGQRFGEMEVWALEAYGAAYTLQEMLTVKSDDVNGRTKMYKNIVDGNHQMEPGMPESFNVLLKEIRSLGINIELEDE

SEQ ID NO: 5990 - protein, 1407 aa, Xenorhabdus sp.
VKDLLKFLKAQTKTEEFDAIKIALASPDMIRSWSFGEVKKPETINYRTFKPERDGLFCARIFGPVKDYECLCGKYKRLKHRGVICEKCGVEVTQTKVRRERMGHIELASPTAHIWFLKSLPSRIGLLLDMPLRDIERVLYFESYVVVEGGMTSLERSQILTEEQYLDALEEFGDEFDAKMGAEAIQSLLKNLDLENECETLREELNETNSETKRKKLTKRIKLLEAFIQSGNKPEWMVLTVLPVLPPDLRPLVPLDGGRFATSDLNDLYRRVINRNNRLKRLLDLAAPDIIVRNEKRMLQEAVDALLDNGRRGRAITGSNKRPLKSLADMIKGKQGRFRQNLLGKRVDYSGRSVITVGPYLRLHQCGLPKKMALELFKPFIYGKLELRGLATTIKAAKKMVEREEAVVWDILDEVIREHPVLLNRAPTLHRLGIQAFEPVLIEGKAIQLHPLVCAAYNADFDGDQMAVHVPLTLEAQLEARALMMSTNNILSPASGEPIIVPSQDVVLGLYYMTRDCVNAKGEGMVLTGPKEAERVYRAGLASLHARVKVRITEEVRDGEGNVTVNTGLVDTTIGRAILWMIVPRGLPYSLINQPLGKKAISKMLNTCYRVLGLKPTVILADQTMYTGFAYAARSGVSVGIDDMVIPEKKEGIIAEAEAEVAEIQEQFQSGLVTAGERYNKVIDIWAAANERVAKAMMENLSSETVINSKGEEEQQVSFNNIFMMADSGARGSAAQIRQLAGMRGLMATPDGSIIETPITANFREGLNVLQYFISTHGARKGLADTALKTANSGYLTRRLVDVAQDLVVTEDDCGTHNGIMMTPVIEGGDVKEPLRERVLGRVTAEDVLKPGSADILVPRNTLLNEKWCDLLEENSVDSVKVRSVVSCETDFGVCANCYGRDLARGHIINKGEAVGVIAAQSIGEPGTQLTMRTFHIGGAASRAAAESSIQVRNKGQLKLTNAKFVTNSAGKLVITSRNTELRLIDDFGRTKESYKVPYGSVLSKGDGEKVAGGETVANWDPHTMPVVSEVSGIIQFSDMVDGQTITRQTDELTGLSSLVVLDSAERTGSGKDLRPALKIVDAQGNDVLIPGTDMPAQYFLPGKAIVQLEDGITISAGDTLARIPQESGGTKDITGGLPRVADLFEARRPKEPAILAEISGIVSFGKETKGKRRLVISPLDGSDAYEEMIPKWRQLNVFEGEVVERGDVISDGPESPHDILRLRGVHAVARYITNEVQEVYRLQGVKINDKHIEVIVRQMLRKVTIASAGSSEFLEGEQVEYARVKVANRKLDQDGKVPATFHRDLLGITKASLATESFISAASFQETTRVLTEAAVAGKRDELRGLKENVIVGRLIPAGTGYAYHQDRMRRRHENEVVEAPQVTVDEATANLAELLNAGFGSSSNE

SEQ ID NO: 5991 - protein, 150 aa, Xenorhabdus sp.
EYAHRILDYYEKRWLIEEFYIAWKSGGTRVEALRMHCKENLEKMVVILAFIAVRVHQLRYVGLNKSEAEKQSCETLLSPLAWKLLWTKQEKKKLPKTAPSVYWAYINLGKLAGWYDSKRNGRVGWERLWEGWFMLQTILDGYLLSKSLDL

SEQ ID NO: 5992 - protein, 214 aa, Xenorhabdus sp.
VHSLKCLQIFLYVFYGKMMLPIVLSSTSIYRRLLLEKIGLPFTCAAPNIDESPQENENPEQLVMRLSQEKATALQQDYSSHLIIGSDQVCILNGELTGKPHNFENAFAQLKKASGQCVTFYTGITLFNSKTRSTDTRCELFHVHFRELTDTEIISYLEKEQPFNCAGSFKSEGLGITLFEKLDGKDPNTLVGLPLITLTEMLTRQGVNPLTARY

SEQ ID NO: 5993 - protein, 1074 aa, Xenorhabdus sp.
MKRMLINATQQEELRVALVDGQRLYDLDIESPGHEQKKANIYKGKITRIEPSLEAAFVDYGAERHGFLPIKEIAREYFPNNYHAHGRPNIKDILKEGQEVIVQVDKEERGNKGAALTTFISLAGSYLVLMPNNPRAGGISRRIEGDDRIELKEALSSLDVPEGMGLIVRTAGVGKSAEALQGDLNFRLKHWEAIKKAANSHPAPFLIHQESNVIVRAFRDYLRPDIGEILIDNPKILDLARQHITALGRPDFASKIKLYNGEVPLFSHYQIESQIESAFQREVRLPSGGSVVIDTTEALTAIDINSSRATRGGDIEETAFNTNLEAADEIARQLRLRDLGGLIVIDFIDMTPVRHQREVENRLRDAVRQDRARIQIGRISRFGLLEMSRQRLSPSLGESSHHVCPRCSGTGTIRDNESLSLSILRLIEEEALKENTHQVHAIVPVQIASYLLNEKRKAVSAIEHRQGGVSIVIVPNDQMQTPHFSVLRVRKGEEISALSYQLPQIHETEMANIQEDVQHERKRPEQPAISTFDLPAEAPAPAAAKTKEKKVATKANSHQKAEKPGLFSRFLNALKKVFSGEEEKQSQEKAKRPSGNDGRRSSDRRNPRRQNQRRERNENENRNNRERDEQRKGRNAQAKNNAQDNTAVDNEAREAQQQQRREQRAERQRRRQEEKRQQQLESKVQQAIKPEVPEEEIEERQPVMPRRQRRQLEQKIRITDSVKEETTIAALPVVTSDSAPVIAEKEKRASVPAVINTETEATTQPAAANESIVQDTAEQNAAMSGSQQNNEQQDNIMPRRSRRSPRHLRVSGQRRRRYRDERNLTQSPVPLAIAVASPELASGKVWVRYPVTPVATTSEPELSVIEEAASEQAVEMMPVPVAAKTAEPAPIFAETKATEQTAVTYEDAKPESVNPSTVESIVESVSGQTNEPVQETTKSVVSHEVSNQAETAPNTVQYDSEEKVAHVVEPIIVDSIAEQEHHEEQPTVATEVCSQTEEVKAKETKATESQVIVAKNHHSYSPMTKAPAPDMAAQPVIISEWERPAHPFKGKGGAGGHSATSVATSGMSKPQIFE

SEQ ID NO: 5994 - protein, 208 aa, Xenorhabdus sp.
MRPWLIFGAGKGIGRHLVNIALEQNRPVTALIRNEEQAAIMSSVGVNVIQGDACDSRSIEKVIEYAGENPIVFSTIGGGNSDHFGNMAIIDALEKAQISRMLLVTSIGCGDSWHTLSPRAKSLFGQSARLKSLAESYLQTSRLDFTIIRPGGLTDQAGTGHCQRYQGEVHGMVSRKDVAQQLNQMSEDKGTYSQIYALVDPELKPNWN

SEQ ID NO: 5995 - protein, 317 aa, Xenorhabdus sp.
MYTKILGTGSYLPSQVRTNADLEKMVDTTDEWIVTRTGIRERRIADEGETVATMGFRAAEQAIEMAGIDKTQIDLIVVATTTGTHAFPSSACQIQKLLGINGIPAFDVAAACAGFTYALSVVDQFIKTGAAKCALIIGSDTLSKTVNPEDRGTVILFGDAAGAMVVGASEEPGILSTHLHADGQYGELLSVPHHDRQKMDTPAYLTMVGNEVFKVAVRELANIVDETLEANGLAHSQLDWLVPHQANLRIISATARKLNMTMDKVVVTLDRHGNTSAASVPTAFDEAIRDGRIQRGQLVLLEAFGGGFTWGSALVRF

SEQ ID NO: 5996 - protein, 345 aa, Xenorhabdus sp.
LANLTLALDAMGGDFGPRVTVPAALQALASNPRLKLLLVGDPEAISPLLANKNAELLSRLQIIPAEYVVANDVKPSQAIRSSHGTSMRIALNLVKSGEAQACVSAGNTGVLMGLAKLMLKSIEGIERPALVTVIPNLKQQKTVVLDLGANINCNSRMLVQFAIMGAVMAEDVAGVKNPRVALLNIGEEESKGLDNIREAAITLRNSELINYIGYVEGNELLTGKTDVLVCDGFAGNVTLKTMEGAIRVILSLLKSPEGQKKKSSWLMKIFRKFLLKLIAKRFGHLNPDQHNGATLLGLRGIVIKSHGAANENAFKAAIEQAVQAVEKQVPEKIAARLNAVLPKSE

SEQ ID NO: 5997 - protein, 56 aa, Xenorhabdus sp.
MAVQQNKPTRSKRGMRRSHDALTATKVSVDKTSGETHLRHHVTADGYYRGRKVINK

SEQ ID NO: 5998 - protein, 174 aa, Xenorhabdus sp.
MQKVKLPLTIDALRAAQKRLDYTGSYSAEQVSRLLESVVSVDSDVDNSLSFQIDNQRLAVVKGHSDVDVTLACQRCGGKFSHHVHTTYCFSPVVNDERAEALPEEYEPIEVNEFGEIDLLAMIEDEIILSLPVVPVHDSEHCEVSDADMVFGVLPPEAEKPNPFAVLASLKKST

SEQ ID NO: 5999 - protein, 316 aa, Xenorhabdus sp.
MKTNNQVVQFVTIDDDEAGQRIDNFLLARLKGVPKSMIYRILRKGEVRVNKGRIKPEYKLTANDVVRIPPVRVAEKQEAPVSAKLDKVAALAECILYEDDYILVINKPSGTAVHGGSGLSFGVIEGLRALRPEARFLELVHRLDRDTSGVLLVAKKRSALRSLHEQLRLKQMQKDYLALVRGQWQSHCKVVQAPLLKNLLQSGERVVKVSSEGKPSETRFKVEERYEFATLVRASPVTGRTHQIRVHTLYAGHPIAFDDRYGDKAFDGQLAETGINRLFLHASSLKFTHPSTGETMRFEAPMDAALRQCLKKLRQM

SEQ ID NO: 6000 - protein, 63 aa, Xenorhabdus sp.
LLLDNLSDYIKPGMSVEDIQGIIAHMRSDYEERVDEYIITNAELSKERRELSKKLKAMDGGVK

SEQ ID NO: 6001 - protein, 363 aa, Xenorhabdus sp.
ILFIIDGLPGGGAENVVVRLCRGLQQKGFTITLLSLSDKCEYPIPDHVDLIINADGYTGPFRRQTEIFRRAKSLDRVLKKNFLQKGIPELVISNLHKTDRIVARSKILCDLNVWFCIHGVFSKSYLENKTGLARWFKKRKIQRIYQDRNLICVSDAVGSDLKENLCVTARRMVTIYNPFNIAEIKLDSLENNPYSDQDYILHLGRFHQVKRHDRLLEAFAKAALPCKLLIAGNGDEKTTNEIKQKIIDLSLQSRVKLIGFLTNPLPVIREAKAVVLSSDSEGLGNVLIEALICNTPIVSTNCPGGVSEIMVGELEKYKSELTSDSLADKMRLVYQNPPIITEMMYKKFAQEVVVKQYLSLLEQ

SEQ ID NO: 6002 - protein, 413 aa, Xenorhabdus sp.
IQPIIWLRLLLRSRKSPAYRKRWSERYGFCAQKVKPGGILLHSVSVGETLAAIPLVRILRHHYPFLPITVTTMTPTGSERVLSALGADVNHVYLPYDLPGSMGRFLDNINPKLVIIMETELWPNLITQLHQRGIPLVIANARLSARSATGYQKINSFIKTILNKITLIAAQNQEDGERFIELGLKRTQLAVTGSLKFDISVTPELAAKAVTLRRQWAAHRPVWIAPSTHEGEEPIILDAHRNLLKQHPDLLLILVPRHPERFAKAEELTQKVGLKSVLRSSGTIPDANIQVVIGDTMGELMLLYGIADLAFVGGSLTERGGHNPLEAAAHAIPVIMGPHTFNFKDICAKLNKADGLITVTDSPSLSSAVNSLLTDEDYRLYYGRHAAEVLHENQGALQRLLKLLEPYLPPRSH

SEQ ID NO: 6003 - protein, 249 aa, Xenorhabdus sp.
VMIAKNAADLIGDCLLSVDWADEIIVLDSGSTDTTCQIATEMGAKVYTNTQWPGFGSQRQLAQSYASGDYIFMIDTDERVTPELRASIEQVLAAPDDNKVYACARLNLFMSRFMKHSGWYPDKVTRLYCRERYQYNDNQVHESLDTQGARVVTLKGDLRHLTCRNLMEFQQKQLNYAKDWAKQRHEQGKTTRYSSIISHTLGAFFKTWLLRAGFLDGKQGLILAVVNAQYTFNKYAALWELTQAENQRQ

SEQ ID NO: 6004 - protein, 160 aa, Xenorhabdus sp.
MKKKAIYPGTFDPITYGHLDIVTRAANMFDHVLLAIANSDRKNPMFTLEERVALAKEVTSHLDNVEVVGFSELMANFAKKQQATILIRGVRSISDFEYEWQLANMNRHFMSELESVFLLPSQNLSFVSSSLIKDVARHDGDVSSFLPEPVTQAMLKKLAN

SEQ ID NO: 6005 - protein, 373 aa, Xenorhabdus sp.
VRLAIVRQKYRPDGGAERFISRALDALGNENLELNVITRSWQGDMNPNWHVHLANPFKWGRISREKGFADAARAIWHKEHFDIVQSHERIAGCDIYRAGDGVHQRWLQQRARILPNWKSKLLFASRYHRYVIDAEERMYSSPELKTVICNSEMVKQEIMEDFGLSAEKISVIYNAIDQAQFFPAKEDERVVLRQQYSIPAEVKCFVYVGSGFERKGLRAAIEAISMTDAYLIVIGQDKAYNKYKQLANSLGCYERVRFLGVQKKTLPFYQMADGLLLPTLYDPFPNVILEAMACGLPVITSRTCGGAEFVESGVNGFVCDALDIKALSEAIFLVPSDHLTSKISMSAKEKIMAYTPAYLSQQLTALYSKVLSL

SEQ ID NO: 6006 - protein, 345 aa, Xenorhabdus sp.
KILLIKLRHHGDTLLITPVINTLKENFPDAEIDVLLYKETEPMLRNFSRVSNIFTIDRLWKKEGIKFLLSHYWRLLKELKNRRYDLVINLADQWSSALVSLLTGSARRIGFDFPKRQNLLWKVCFTDLVSTEGEESLHVVEQNLSALKPLNLSVTNFDVTMTYCDEDKEKVFNLLHTGRIHQKYIVIHPASRWFFKCWDEDKISQTINTLQADGHSVVVTSGRDPQEKDMVGRILSTCSQENVISLAGQITLPQLGALIDHAELFIGVDSVPMHMAAALKTPCIALFGPSKLVFWRPWQVHGDVIWAGNYGKLPDPDDIDTKTDTRYLSAIPTDVVIETARRYLS

SEQ ID NO: 6007 - protein, 269 aa, Xenorhabdus sp.
MPELPEVETSRRGIEPHLAGNVIHYVEVRNSRLRWPVSEQIMKLSDSRVISVQRRAKYLLIELSDGWIIVHLGMSGSLRILLHDSPPAKHDHIDLVMADGKILRYTDPRRFGAWLWSQSLEECSVLAHLGPEPLSDLFDGEYLYSLSRNKRTAIKPWIMDNKVVVGVGNIYANEALYVAHILPERPAHSLTQEEAHLLADTIKQILRRSIEQGGTTLKDFLQSDGKPGYFAQELFVYGKKGESCPICGEKIDSIKLGQRSTFFCRQCQH

SEQ ID NO: 6008 - protein, 292 aa, Xenorhabdus sp.
MCSKANYLLHKHPDIPHFFESHEIFSQSFKESRDLNTYVNKRKYSKLRKIEQHVYQRARAVFVLTSLLRDDIYTEYCVKTPIIVAPDGVDLLAVEETKMTSSGRQYQQGEITQVLYLGSLHRWKGVPTAMKSMYYLNNAVLNIAGGNSEQVEQLKFVAQQIGVSDRVNFMGFIHPKDRFRVIADNDICILPLTKTSIGSRYTSPLKLFEYMAMGKPVVISDLPSIRDAVDEKSVSFAHSENAESFAQQIQLLIDNPAEIVLKTEHSQRLVEEHFNWDQRAKLIMQEIEKNLS

SEQ ID NO: 6009 - protein, 194 aa, Xenorhabdus sp.
IYNTLLNNGQFTIHHGLVYQQINFGDVLNQCIDFLSSYPSETIFMRVKQEYSTVSDADFIAIFNGHYGIFHQYMYLDSNIPSLGQVRGKIVIISNVSGLPGIPWDVFYIQDDYDAVGLFEKWEAISEHFNLTIKNHSSGGKDFFINFLSIQGNPPHWTIKKMSYNINGSFATMLQEGNNVSGLGIGIIPMDFPN

SEQ ID NO: 6010 - protein, 519 aa, Xenorhabdus sp.
RSMVVGLLAILKAGGAYVPLDPAYPTERLSFMLEDSAPVALLTQTTQADKLSCSITTVLLDAQATELATLPDTNPDTQALGLTSRHLAYVTYTSGSTGQPKGVMVEHRNVLRLIINNGFADIGPDDCIAHCANISFDAATWEVWSGLVNGARILLVPEKTLLQPVEFGQCLSAAGVSALFLTTALFNQYADLIAPALSGLRYVLFGGEKSDNRAAMRLRAEYSPQHLLHVYGPTETTTFATAYDMPRMESGKLPIGQPINNTRIYILDNQGQPVPTGVPGEIHIGGDGVARGYLNRPELTAERFLTDPFSPEPNARMYKTGDLARWLPDGNIEYLSRNDFQVKLRGFRIELGEIESALTSHLQVKQAVVIDREHHGHKALAAYLVTDGQISDENLLDYLSAHLPDYMLPASFTQIDAIPLTLNGKVDRRALPDPVWGDRDNYVAPRNALETRLCTLWQEVLRLERISIDDNFFRIGGDSIISIQLVSKLRQAGFTLQVTSIIEAPTVASSPITNAGNLC

SEQ ID NO: 6011 - protein, 1764 aa, Xenorhabdus sp.
AEQGILNGEFDLLPVQQMFFGWALTKPHHWNQAFMVRLPGDIKSAQVEQALAALADRHDILRAHFVRTEQGYRQCYPARMPSSPLPLPHCDIRWLDEEALHQQLTSWQNHFNYDNGPLWQAAHLTGYTDGSARLFFAAHHLIIDVVSWRIIAEDIRRILQGETLPAKTSSYRQWVKAIRQYAEQHQQEITYWQQALAETSAHTASDNLSQHTLSISTALTGILLREANAGYQTEINDLLLSALALALQEVFSQSVNSITLEGHGRENIDQTLDVSETIGWFTTLYPVRLAMQEDIADTIIHTKEMLRAVPNKGIGYGALRQAGALSGDLPAISFNYLGQLGGESEQHWALTRDDTGNTSANENHSHLLLNINGLVQAGQLQFQIGSRLTADQTQTFIATFEQALRSVITTAQKQAQSGGIKTPADYGIKGLSIKLLRQLQQVYQIEALYPATSLQQGFIYHHLAQPQDDAYCVQILLDYHTQLDFAAYQQAWSLASLRFPILRTAFNWTEEVLQIITEGASISTANFSMKDIRSLPEDKRHKAISTIQQRDRALPFDFSLPGLIRFTLIQQHEQLVTVLTTLHHSIIDGWSNPILLQAVHEYYNAIIQGDMPEIRVDQAYPATQQYYLDHQAESDRYWAERKAQFQGTNDLSALLSHRVDLGQIKTIEHPAEQGIILQGSAYEQLKNTCRTQGVTLNVALQFAWHKLLNSYTGDEQTIVGTTVSGRDVPVEGIADSVGLYINTLPLMVQWDHTDSIAAVLQVIQQDIAALNSHSAVSLSGLQSDGERLFHSLLVFENYPVPVADENNSGIEHTVAFRQSVEKVDYPLSLMAYEQDNRLIIKLSYGEDWLTEEQTQRLLAQLERILSAVMYAPNQPHTEITFFSEEERHTLLHSWNQTNVPYPQDKTLQQLFETQVEKTPDNVALVFEDETLTYRQLNERANQLAYVIRECYQQQNNKEMSADTPIALYLDRSSEMVISILAVLKAGGAYVPISPEYPAERVQFILQDTDTPCVVTQQCHLTTLRQCTSALPLRPVLIAADDHTIIQNQPIENLVPINKSTDLAYLIYTSGTTGQPKGVELTHRNVINHLYWMQSEYPLNISDKVLQQIPYTFDASVWELIAANCFGASIVMASPGSHRQPEDLYQLIQKTGVTVVQFVPSMLSAFCQIVRDLGQLLPSTIRYVLCGGEALTMSHVNAFRAINRHESILINLYGPTETTNDITHFDVPDEFSGNVPIGKAHHNTHLYVLNQYGKLSPVGAPGELYIGGAGLARGYRNRPDLTAKYFVNNPFATDEDKAQGYTRLYKTGDRVRWLPDGNLEYLGRNDFQVKIRGFRIELGEIESALSSHPQVKQAVVVDHEHIGNTVLVAYLVTDDKLSDDTLRGYISSRLPEYMLPASFTRIESIPLTVNGKLNRRALPEPVWENSDHYVAPRNELETQLCALWQEILGLKQVGIEDNFFRIGGNSLVAIKLTSAIRDTLQIDIPLNILFSGKCISSLSQWLETDADHAQPSLLNFFTPESTATNKLFMIHPANGGSEVYESLASALSDNYNCIGINNYNLSTDNPTDSLYQLAKIYRKLMLTETTIDHPIYILGWSLGGQLAMEIAFQLEQLGATKIQLFLLDTVLNNEEIKALRDKLDISAINEVVTENLQKLGATNTYINKILEIMPFENSIANGELSGKLNQTNIILFKAGQVKSLNKGEIELPIGQLIIDIPDNNISQWSAKPIVVKQITDYYHENMIDAVDLISTEAVNLLGSKEEVLL

SEQ ID NO: 6012 - protein, 108 aa, Xenorhabdus sp.
MPKGEEETARKFYIDILGLAEIQKPANLAKRGGCWFISGEVQVHLGVQEDFYPGTKAHPAFLVDNLNQLRRLCTDAGYTCQDDVPIEGFNRFHVYDPFGNRIELMSHL

SEQ ID NO: 6013 - protein, 433 aa, Xenorhabdus sp.
MPANYYEASLADWPAFGSLPGDQSCEVVVIGGGLLGASTALHLAEAGVDVILVEKDNIGSGASGRNGGQMTPGIARWSAETILEKFSPEEARRLWQFTSVEAMDLVDELRSRYGFECDRKYGHITAAIHPGHMGPLVANADARRRLGDKMVKVIGPFELQEEYVRSDIYHGANIDSISGQVQPLALLRGLAYGFAGLGGRIYDNTKVTGIRQEKRGAVIETSQGTIRASKAVVLGVHASTGEFISGSSTTVPFFTYVAVTSPLPMPIKELLPSDLPVYDTQLQIDYYRSVRNNRLLFGGQGTGNSWSSRDVNNYLLDRIRTVFPQLEKPELEYSWGGISDLTLNGAADARKSDDNTPVYMVHGWSGHGVAQTVRIGKAISDDVTGRNRDFNMLTSIDHTSIPLGSYFSPVVIPLIKGALGVMSTFNPADMVSF

SEQ ID NO: 6014 - protein, 191 aa, Xenorhabdus sp.
ALKGDLVAIHGRFTGLDTQPLVGFDLYRVVDGLIVEHWDGLVPQAAPNASGRTQLDGPTEAGDNHDREKNRKLVVNFFRRALIEGDYGEFITYTNGEAFRQHSPDISDGAAAVIAFLQQLKDEGKGLHYTKIHHTVADGQFVLTHSEGSIAGERHSYFELWRVENGKVAELWDAITPVPEDEQALHRYGIF

SEQ ID NO: 6015 - protein, 160 aa, Xenorhabdus sp.
AYGLSGLSWSETVRTDQQMEYMIYPRLLPLAERAWHQAEWEQNYQQGREYKGGITRYVDTDKLNKDWLHFANLVGQREMAKLDKAHIAYRLPIPGARIISGTLEANIALPGLTIQYSLDDGKTWETYDDRQRPHVNGHVKIRSVSTDGKRFSRVEEVSSE

SEQ ID NO: 6016 - protein, 65 aa, Xenorhabdus sp.
AKTRPPVKLIFGSLSQMGEKIIRTIGQLRANFAMTMKATCYDLQRWVYFTEERVHAFYFRDVMKK

SEQ ID NO: 6017 - protein, 578 aa, Xenorhabdus sp.
VKTFEQYFQNEIDYFRALQELVRQEKPHLADILNGQDPDVARIQEGFAFLAARQQQKIDDAFPEYTQPLLQRLHAQAIKGIPATSVVQLGSRQDADFAYTVPTGNHITSAHNTSFITCRPCHIEPLSLIRRELHHQAQETQLTLTFRYTGKDNHWPITPINLFLSTDETVANTLMLAMTQDIDDIQFYRERTRYPMDGIRLEPLQGTARLLLSSPQPAGNWAPQMLLESLYLPHVHAFVTLVLPTSMRNQLLMTETREFSVVIKFSCELALSEAQIAEAFHLHCVPMFNRQTTQLTVPFSPETTRYRLPLSPSQGLLGVSDIGLEHEPDEEHERGDTCRFYPDRLLTGMDRFPEDKQNWFYSLEMSEDALGRLQYDLIFRDSLGQPMVQPPAQKFICQIMTYELQPVTLQADEICNADETLPDNVQIKNLTLPSFPYPPVTDSHRYWTLLSHYSASPFLLYAVDALKELLHGYDFYAEADRTRSRTLRRMIEGIVAIHSESKDWVIRGKPHRCLFVELTLDDSVYHDEGEAFRFAHTVFQFLPFCLTQDMRLLMTCRTTAGKSYALSRYPVQGYRPLM

SEQ ID NO: 6018 - protein, 45 aa, Xenorhabdus sp.
MTVVSVTNAIPLREQLNREASLTVKRNGVVERTINGIVAGATPVS

SEQ ID NO: 6019 - protein, 504 aa, Xenorhabdus sp.
MTANSYLEYFLTLLGWVINNGLWHILIATGLFTLPLVVKVIAVWLKVRECGEEDGQAGLQSLARIENTLYGAFFVMVVCCVPLVNVSLTTLQYDTSRAKRCGTWTPTAPDNSGYAPVMSSLNNQTAAVPLWWAVVHRLSKGLTQAAVASIPCRPDLRQLRFDVQHTRISNPALAAELQDFTHDCYALALYQWKLRDQEHTTDPIILNDIGWLGSRTFLAGDYRTLQSRLPRADFPWQESRDNGRPYTGQGGYPTCQAWWSTAQTGLKDRVLAQADPGLWLRLSATLKILGKNTPAYQEAVIRRLVSPVNLTISQEGYVYAGYGGNADPTLLDGANRIGTSAGALLGGLLSMPMFDAVRQALPMMQAVILMALYILIPLIVLFAAYEFKTIFTLTFVIFALNFLTFWWELARWLDSHLLEALYGSDTHSLFNLAGIQNTSDDLIMGLVMGTLFIVLPMVWLGALAWAGVRMGDMAGMMSQGVGQVRQSAGMFGQLVMQKMMSKGK

SEQ ID NO: 6020 - protein, 91 aa, Xenorhabdus sp.
VMGITLATGWVGLHQAEKLNHIHHWVTETGGVWLVWRLGLYAGLGWGGQKTWQRVKHLPAYRAMLIRMMVASLLFILLGEYALSGTIEEIR

SEQ ID NO: 6021 - protein, 469 aa, Xenorhabdus sp.
MVGGLVIASAQANATGLSLTLPQVNRSALGYGADASGAVSDTLFYTLGGGSVISEPASRSGSTTLGGLELGWRSDLMCGNFDLKATVSNQLNGITAGFKNLMSDVIQGATGAVASLPAMIIQRANPGLYDMLTNGVLQANVAFDKAQFNCQAMANKMMDFAQNNKWTQSAALQEYKSLVNGGDGDAVRVNNAGSKATGAGGHPWIGGQRQGGKGQNAIRPTRDLASAGFNMMNQLPVLSQSSVSSLKCEGSACRKFSNAREAAEAVVSVLGDRVIRTCAQATDCTSGGEKHQPGTTVAGTGFAPMLEAHTQTNTEQLVKLVSGTEKPTMVNLAKLKTGSLTVTKGIIQALQRDPDKAALTGRLAGELAMAETVETALLMRRMLITGMSEPNAAAQSEALAEGERRIAALDREINALKNEMQLKQALSRNAILTIIERDTQRIHMHPQKQVPDNTDARFYQLETPSRERR

SEQ ID NO: 6022 - protein, 302 aa, Xenorhabdus sp.
VTQASINTAQIVAGSLSPACIQWRVSGLCYWLLCGLHGCTVKTSVKVTHYLPEAVVSTYHASGGNPWTEMAQVSQLSGGLENTVTGALSHLSAGGGNHNVQIAGQRRTSLRFKYADAIGHPATNLIGGQIPGYSCRSAVTPLVPYFLSTLDSVAWRSGLPESFYPEALIPGQREVGSQMAGTVWGNIYPRSGFINQTDDDKASAVVAQRVADIITRVGQPHVYQTLKGTRTDGYWPPESVTENTGSKNHQWQRLSPTLSQSCAVFPDGAHTAAIDSNQAYALWQPYSCCQRRGQRFLSSTDI

SEQ ID NO: 6023 - protein, 115 aa, Xenorhabdus sp.
VHAKTVIYTDSQHTPTHLTPETQVVWLDAAEQQQKQIFSQLSTDPQQAAVQAQAILQSSHWHQQEQQLIKAYRAVVQAWQSGVKKYPAVVFDDREVVYGTADVVKARVLREQYQP

SEQ ID NO: 6024 - protein, 113 aa, Xenorhabdus sp.
MPPRIPRACRKQGCPKTTTDRSGYCPDHLHTGWQAHQQGKNRHARGYGSQWDKLRATIKQRDKHLCQQCLRQGRATTGTTVDHITPKAQGGTDALSNLQLLCEACHSRKTATE

SEQ ID NO: 6025 - protein, 218 aa, Xenorhabdus sp.
MGLDDKTIDPLFDDAVEYLITNEYASINDVKEYFGIGYNRAALLLQQMEEMQIVTWEHNNGASRYKIITPLTKKATRQEKKEPITSPSVANTKKSDSKVLGYGGFEWLMAGIGFIAIIVVFVSCSSRTPAPATDYCTDDKTAYIYAEKLISSHLKAPSTAKFASYYDVKSYKPEECKFNFIGHVDAQNSFGAMIRTKFNVVVRYEPKSDKYYLENLDM

SEQ ID NO: 6026 - protein, 153 aa, Xenorhabdus sp.
MAGRPPTPTHLRLVRGNPSKRPINVNEPKPEKGVPPIPKHFGKMGRYWHERIAGELDKVGVLTSLDAKALELLIEAYVEYRTHCDTLESEGYTYRTDQGLIKAHPAAGMKADAWKRIHAMLSAFGMSPSSRTKVNMVGEDKADPLAEFLQMRD

SEQ ID NO: 6027 - protein, 120 aa, Xenorhabdus sp.
MSQSAGTHDITVAIKYDTEALSQLESQLEHIVELLDRIHGRRYDEDMTLAVDKGVVAEGFKLFDSEKKLRVAIPPLREAIYGPVQTTEIINDDHLRQIVREELRQFVARESERGGLFSKW

SEQ ID NO: 6028 - protein, 71 aa, Xenorhabdus sp.
MTDKIRTLQGRVVSDKMEKSIVVAIERKVKHPLYGKFIKRTTKLHVHDENNECGIGDVVETRETRPLSKTK

SEQ ID NO: 6029 - protein, 63 aa, Xenorhabdus sp.
MKAQELREKSVEELNTELLNLLREQFNLRMQAASGQLQQSHLLKQVRRNIARVKTLLTEKAGA

SEQ ID NO: 6030 - protein, 136 aa, Xenorhabdus sp.
MLQPKRTKFRKVHKGRNRGLAAGADVSFGTFGLKAVGRGRLTARQIEAARRAMTRAIKRQGKIWIRVFPDKPITEKPLEVRMGKGKGNVEYWVALIQPGKVLYEMDGVSEELAREAFKLAAAKLPIKTTFVTKTVM

SEQ ID NO: 6031 - protein, 233 aa, Xenorhabdus sp.
MGQKVHPNGIRLGIVKPWNSTWYANTKEFADNLDSDFKVRQYLNKELVKASISRIVIERPAKSIRVTIHTARPGIVIGKKGEDVEKLRKAVADIAGVPAQINIAEVRKPELDAKLVADSISSQLERRVMFRRAMKRAVQNAMRLGAKGIKVEVSGRLGGAEIARTEWYREGRVPLHTLRADIDYNTSEAHTTYGVIGVKVWIFKGEILGGMAAVEQVEKPAAQPKKQQRKGRK

SEQ ID NO: 6032 - protein, 110 aa, Xenorhabdus sp.
METIAKHRHARSSAQKVRLVADLIRGKKVSQALETLTYTNKKAAGLVKKVLESAIANAEHNDGADIDDLKVAKIFVDEGPTMKRIMPRAKGRADRILKRTSHITVVVSDR

SEQ ID NO: 6033 - protein, 92 aa, Xenorhabdus sp.
MPRSLKKGPFIDLHLLKKVEKAVESGDKKPIKTWSRRSTIFPNMIGLTIAVHNGRQHVPVFVSDEMVGHKLGEFAPTRTYRGHAADKKAKKR

SEQ ID NO: 6034 - protein, 274 aa, Xenorhabdus sp.
MAIVKCKPTSPGRRHVVKVVNPELHKGKPYAPLLEKNSKTGGRNNNGRITTRHIGGGHKQHYRLIDFKRNKDGIPAVVERLEYDPNRSANIALVLYKDGERRYILAPKGLKAGDQIQSGADSAIKAGNALPMRNIPVGSTVHNIEMKPGKGGQLARSAGAYAQIVARDGSYVTLRLRSGEMRKVLADCRATLGEVGNAEHMLRVLGKAGASRWRGIRPTVRGTAMNPVDHPHGGGEGRNFGKHPVTPWGIQTKGKKTRSNKRTDQYIVRRRSKK

SEQ ID NO: 6035 - protein, 100 aa, Xenorhabdus sp.
MIREERLLKVLRAPHVSEKASTAMEKTNTIVLKVAKDATKAEIKAAVQKLFEVEVEVVNTLLVKGKVKRHGQRVGRRSDWKKAYVTLKEGQNLDFVGGAE

SEQ ID NO: 6036 - protein, 201 aa, Xenorhabdus sp.
MELVLKDAQSALTVSETTFGRDFNEALVHQVVVAYAAGARQGTRAQKTRAEVSGSGKKPWRQKGTGRARSGSIKSPIWRSGGVTFAAKPQDHSQKVNKKMYRGALKSILSELVRQDRLIVVEKFSVEAPKTKLLAQKLKEMALEDVLIITGEVDENLFLAARNLYKVDVRDAAGIDPVSLIAFDKVVMTAEAVKQVEEMLA

SEQ ID NO: 6037 - protein, 210 aa, Xenorhabdus sp.
MIGLVGKKVGMTRIFTEEGVSIPVTVIEIENNRVTQVKNEETDGYRAIQVTTGSKKASRVNKPEAGHFAKAGVEAGRILREFRLSEDDAEFTVGQSISVEIFADVKKVDVTGTSKGKGFAGTVKRWNFRTQDATHGNSLSHRVPGSIGQNQTPGKVFKGKKMAGQLGNERVTVQSLDVVRVDAERNLLLVKGAVPGATNSNLIVKPAVKA

SEQ ID NO: 6038 - protein, 108 aa, Xenorhabdus sp.
WSSGLMQNQRIRIRLKAFDHRLIDQSTAEIVETAKRTGAQVRGPIPLPTRKERFTVLISPHVNKDARDQYEIRTHKRLVDIVEPTEKTVDALMRLDLAAGVDVQISLG

SEQ ID NO: 6039 - protein, 158 aa, Xenorhabdus sp.
MKGDKKIIAHLNKLLGNELVAINQYFLHARMFKNWGLVRLNDVEYRESIEEMKHADRYIERILFLEGIPNLQDLGKLNIGEDVEEMLQSDLTLELRGAQDMREAIAYADSIHDYVSRDLMIEILADEENHIDWLETQLDLIKRMGMQNYIQAHIIEEE

SEQ ID NO: 6040 - protein, 394 aa, Xenorhabdus sp.
MSKEKFERSKPHVNVGTIGHVDHGKTTLTAAITTVLAKTYGGNARAFDQIDNAPEEKARGITISTSHVEYDTPTRHYAHVDCPGHADYVKNMITGAAQMDGAILVVAATDGPMPQTREHILLGRQVGVPYIIVFLNKCDMVDDEELLELVEMEVRELLSQYDFPGDDTPIIRGSALKALEGDAEWEAKVVELAEALDTYIPEPERDIDKPFLLPIEDVFSISGRGTVVTGRVERGIVKVGDEVEIVGIKETTKTTCTGVEMFRKLLDEGRAGENVGVLLRGTKRDDVERGQVLAKPGSIHPHTQFESEVYILSKDEGGRHTPFFKGYRPQFYFRTTDVTGTIELPEGVEMVMPGDNINMVVNLIAPIAMDEGLRFAIREGGRTVGAGVVAKVIA

SEQ ID NO: 6041 - protein, 1062 aa, Xenorhabdus sp.
MESVDSIFTKTGEAVETASEKAKQVFEKIVDEAQARMPHQLDMDTVVRPCDANIRPVYPVRYAYMNFFGDKLLSAQLPPPISAFIDPYDDSLSASVLRGYSIRMPRAGWIYVKEEGPIKTRGSQRDGKLLIFKFSPEIVTLEGKRGMVTKYTKYEQKAGSSAWEEIHPASGTAGLGYPFLAMDKDVSKISIVYREVKLAKSILKKMDNDKAFRRNGMQFVDLDSEQSDYAIDAKQEPFDGLVEDFKDPERQFQTYKKQLSDPALQSADLGDISIDGSFFMNSDMEMRYIDSLICPHYKDKAKIVVLNDPVGYQRDILMAYMLLSAWQINYAATYIHPISIGQFVEQMEKSKDEKIKKYFKDYISQENWRTWWPKLNAPISETTAKLKKIVSLYKVFFEKNYLSDQKGGLAHYFNYFFSVTKKKDVITESDAREFSVFCSLFSELIGPLSYSEIGIRQIEQLLGGAQASESGSTWAVIGNGIVNTLGHAGADKTLVAKNLILGVDILFEAIGPVFGKFYVFLAEKTHKKALDLHVKSIEKITQILIPKCLAILGIRIEKGQYAALTEKDFYKFLKQIEPKEQSGFFKKSASKFKHYFQKEGLEKVFDWDKRINNYTGRQKIKIPVIHYEQPKFNAGIKFFQHNNQYISHLLDSGLVGLDLFMKAYTLNTLLAQSRFDKNSPFGTNRLPMYFAGTFMNTILGGFLAVRGASNLISRGIISTGTLMPKLGSPAIRALIGKASSKMLLNSANMVAFTRLGIGISGVGSAILSYTDAVNSFELGNRGEGYSHISIGSGTLLMTLAYGYAAATTTSTTTGAVAGVVAVDAAAVTLTGAALVFFWAGVFIAILGTLYLLIFSKDEFENLLQNCFWGNGEKYAFWSRDNPRPPKIEVQFERIIEMSDAIRNASKVEYQEFANLFMTPTLKKEFKDKKAIYSFTLPNFQWGKSEIFYQVIPSSLSALSAGSPFVPIAPNVITSDISTRQSAKNNFEELMKAEYKTLTDGGALTTLTIEMDSLEASHSKIFWYYMPTKDVIAPLRYEWGKEPIIENAIYGYDDEVLRSKIGI

SEQ ID NO: 6042 - protein, 395 aa, Xenorhabdus sp.
VDYSFTNKERNLFSAQAIIHAKSERQALSELVEYLLNARHSPGQYHTIQPLLDYLTTSSRQELPLLRRFRQGQGQGERVMSLNERNNSLPLPAERGVLQFVVTDSMPEKPETKYRYAVLDAAVYRQVMGSFLSADLMVSNLRWESLFQGETQVTLEDSAPYLVELTESGDAYSRFRQIITQPMASALGIFIESDQPFSALRNHLRKFTYLKNEQQQIWMFYRFYVPLGLIPLLKSLPDEQLMHFMHPIQQVGYFDSQTKQYYSLSLAENALDKDKTAPVTINAALISSLAEQTQQRALAQIVKFIEETQPELTSQQKAQLPTFVLQQSNLVCLAGFAHQRSVLYLVAARSLVRDDEELWLRAWEHACAESQAQEVRALSCYEYCFNNSFKNRIAK

SEQ ID NO: 6043 - protein, 667 aa, Xenorhabdus sp.
GLVFTCQIGSLPLTTFQVVDFSLQEGLSQLFHLSMTVVSSFDNVGLSEQLGASAALTVIRDGAIERTINGVVAGAEQGNTDGRRTYYTFIIRPEMWLMTLNQDSRIFHHQSVPDILSQLLKEHRIKADRKFYKDHQQHSIREYTTQKRESAYEFWCRLAAEEGIMFWFEEDKLFYSNSHLGMLAALTLTYNVQANTDNSDSTAWQWNYGEYLCPDETIHKDNNFLRPSYPLQHMAALDNGGNHSVFESYGRFQIDAEGRPFTQLRLEQLQNQSTVGKASTNCIKLRPGRIFVLQSHPIMAMNDRWQVITVTHHGHQPQASGDAGEGTTLTNNVTFIPGRQDWRPPFRHKPLADGDEVATVVGPEGEEIYVDKHGAIKVHFHWNRYDEADDRASCWVRVAQGWNGNGYGFMAIPRIGQEVIISYLNGDIDRPIVTGCTYNGRNRPPLDLPAEKTRTTFKTHTHKGEGFNELRFEDAKGSEEIYIHAQKDQLIQINHDKTQRVGHDESHNVLNNRKHEVGNDEFIRIMHEQHVQIDLNQFETITKDRKTRINNSWEEKIFADHLQEIGRDKTAKVNNNYTLNVVNNIQTLTKMHSLQASESVLIKGKAGSILLNGQGVTITGKITLQGNVSVMAGSPGSVPSLDGSANEGLAMAEDCREKAKKLKESSE

SEQ ID NO: 6044 - protein, 581 aa, Xenorhabdus sp.
VVNPFEYYYQWELDYLRQLAKTAREEKSHLGDVLSGRDPDAERVNEGFAALMARLSQKVNDAFPELTQPLLQKLQAQPIKGIPATSIVQFESGSQGDFSFSIPAGTEVYTHHQQPFVMCRECSIEPLELLSREMTHQVQTTKITLKFRYNGREEEWLTQPINLFLSSDEQVADALMLGLTQYYDGAELHHNGQVYQAHGDRFEPRSGASRLALSSAVGDNWAPQLLVESLYLPHINQFLSLPLPTMVKRLKLAEQREFSVVLSLNTALPLSAAQVESAFLLNCVPVINMARNSQVTLPFRPETARYRLPLIPNQGVLHITGIELKNEPNTEEEKRGDEYLFYPVSLLTGMERYHPEYNRAWFYSLEVIKDALGRIQYELIFYDSKAELMRRPPEREFICHFYGIEQYQEPLAIGEICQSGENIPEVFQLKNITPTSQTYPPVVDSHRHWDLLSHYSVGSHLLETVASVKQLLLDFDLYTDTNRSSSRNIQRMIGGIANIEAKWGDRIIRDRSVRCLLVTLMLDETAYIDIGEMYRFANSLYQFFPFCLAQGTWLRMRVLSQLSGTEWYLSPSMIQGYRSIM

SEQ ID NO: 6045 - protein, 136 aa, Xenorhabdus sp.
CRHVMQSQAALPEELQQQWPSIQSVIEVVSERSTKGQPAHRDSRWYVSSLPLDAETAAKAIRRHWAVENELHWVLDVAFREDNISLKDPDGAAQMALFNRIALNVIKQNTSIKDSQAAKRRRATWSGEFRSQLIFD

SEQ ID NO: 6046 - protein, 33 aa, Xenorhabdus sp.
MDVIFLAFSAVLCGASGWKSIQEFGELQIDFRA

SEQ ID NO: 6047 - protein, 996 aa, Xenorhabdus sp.
MIIGSPEHVEQLIPGLVAEQWLESDGTLLIWGGNITANVDDTIDQSLRQLRRTRPLDAFIWVTDQYQHQASLEASVHSRLVSGHASETLSRHLTQRYQSLGWRVPVYVWSLHQTSWDNAHEQVSAPGCFLSSSCTQESLHTSLNQLVPMITEQGTQQLIHNSRHDFLLTLANFLRQEGSEKISASLAVFFNSHQQLPLAGIVFSLSFIAGKRVDIHHWGRDSRWDSLLSSFQQLPPKLRATKLGWQWRKAGNRLLSVLMVMAGAGMLVSYASNRHLVQQGAEQLELAKNDQAPLAERIQAWLELQDMLSMLQYREMHGTPSYARLGLSQNDTVLQALWPVYTQYVMPWLRNSVAEQMEKNLNMLVSLPPNSAARSVAAKEAYGPLKAYLMMGQPENIDEGMFRETVMENWAVPAGMPAAAWQAKVPELLSFYAKNLSNNPDWTMKPDEELVRQSRTALVREIGHRNGESSLYQKLLQQVSTHYADMSLSDMTGDTDSELLFAADSFVPGMFTRKAWEESVEPAIERLVNERRTEIDWVLSDGQQNASDELSPEVLRVKLTDRYFADFSGAWLNFLNGLHWRRSDTLSDTIDQLTLMADVRQSPLIGLMNTLAYQGKTGRQEVSDSFAQSAKSIFNKDKQPAISQKVGFTGPLEPTFGPLLELIEPKAGAQDGQHLSLYSFLTRVTRVRLKLQQVTSSADPQAMAQTMAQTIFQGKAVDLSDTRDYGNLVAASLGQEWSGFGQTVFVLPMEQSWQQLLAPTAESLNAQWKRAIVDDWNLAFGGRYPFKLGGSEVSLPLLAQYLRADSGRISRFLESRLSGVLRREGNHWVPDSINAQGLKFNPEFLSALNTLNSLSDIVFTSGEARLAFEVRPGTAGGVMQTNLVIDNQKLIYMNQRPDWKKFIWPADTTAQGAILSWSGTRSRMRIYAEQPGTWGFIRLLEKAKVTPWSGSSSSYQMSWRTPNGQVLNYTLRTEAGEGPLVLLKLRNFVLPDKIFD

SEQ ID NO: 6048 - protein, 281 aa, Xenorhabdus sp.
MQGTLSEQLARSIIEMPKIVDASTGKIIRRKSFWSKVEQTEDLLYEKICILLADNELSFALGDLLKKTNIQVCLELDANLSSSQYQKVWEKVCKNSQITLPVSYLHGQGVETLDQWIDSYSSHEPLLIISVHLSKSDDDGHGDAAVALLVTSSSSKVISEIDSTRLCRPENLGQNEINYALSQALLWGKSCGEDIQYLWISGMGCDNKARIAAAPLGEEYPHLTQPENQIDIDGKIGYAGAASLWLAIAIALESVQKNQKPQLIMSAISQDLNKPWFMVVK

SEQ ID NO: 6049 - protein, 307 aa, Xenorhabdus sp.
MNSTYLETVDRYYTFKGFPSLMSFVMAVIFFVFLIAFCITYVLRHVLGDELSESDDIYFIIPFIALSIFAVYAFSTVVLKEWFRKTHYPIRFNRKTQMVYVYQVNGTVLVAPWNNIFFTLYEGKGIGLGWGIDGHILADDNETVLQTFSLGIYDSKVNIPGYWEFIRCYMEEDVLDELPKTIFLCHPISEKKESYIYGLQYILRVDTKWDWFYKLLLVPYYLLESFSRYIAMQTSKIPQWPEEVEEKCEVAVDDPVNVSYKNNIPYVWRYFLANLKMKDHLKYHKQQIIAVKRIKRRVTKRHKIQNT

SEQ ID NO: 6050 - protein, 204 aa, Xenorhabdus sp.
MDKTDTFPILTSNVKMPVEPQGETAYTARILREGFLYVYYEKFNLWEVYTVTSKGHYYLHPGAGGAPQCLSSEKKTVCMDDESKVARASFITLYIMPEGQENGVVWFAWSDAPWSEKMKKKHEDQAQRIKNMQPFDVDLWLSSSKHENVESLNNLQNTVAEYSTSSKKIVKGLVSTITDVSHITLMPFTVPIQKLIWEKFQSKG

SEQ ID NO: 6051 - protein, 484 aa, Xenorhabdus sp.
MDNKKKLSLGLVILPIVAMLLLLIIGYGQLSLRIESLLLVSAVIAALLAFWQGYRWDDIINAIVEKLVKAMPVIMILICVGGLIGTWMLSGTIPYMVYWGLKLISPEYILIATFFITSVISVCTGTSWGSAGTVGVALMGIAASLDVSLAATAGAVVSGAYFGDKISPLSDSTNFAAIVADTDLYSHIQHLLYTTIPGFLLATIVYFIAGHTNLTDSSATPEKITAITQSLESLYHFNLLLILPPALVAWGAITKRPVIPIMLAASVLAIVLGVGLQGFTIKQGLNSLIDGFNLSMFPEQESHLIGNVNDIPLLLNRGGMSSMMGTILLIFCAFAFAGSLTLTGALTIIINWLLQTVHTTGQLIAATLATTIVVTATTCDGKLALLIPAELFKGAYQQIGLDNKNLSRTIEDGCTVIEPLFPWTSAGIYMATTLGVSTLDLLPWAIQCYTAVFLVLIYGFTGFSIAKVAPKNSLKNNEAQRDSI

SEQ ID NO: 6052 - protein, 333 aa, Xenorhabdus sp.
MATMKDVAHQAGVSVATVSRVINNTTYVEPGTRERVEKAMRALDYRRNLAALALTKRCGNMLGLLTGNWADPFFSLLARGVEKVARQNETKLMVCNGRHQAELEKAALDFLINQGCEAIVAYVSRMSEADILRYVAHTPGLVIINRYVPAIANRCVWLDNISASQIATNYLIENGHRKIAYITADLPIDDRKLRLEGYYNAMAQAGITIDNDWIISAPFNEKGGEQAAEKLLNCRTNFTAVLTFNDVMAAGMMRFLHRRKINLPEQLSIVGFDNIVTAQYLYPPLTTIHNPIEKMAQRAANMALHLSAKKELPPQMNMFSGELIIRESVSLIE

SEQ ID NO: 6053 - protein, 357 aa, Xenorhabdus sp.
LITLIAIICGFTAANMYYVQPLIPIIRDNLLVSYEKASMLYSLSLVGNAASLFFIIPLGDFYNKKKLIAILYLISSLSLLVFFVCDNYYALLLMSFLIGVGTSAIPLIIAGLSKQKNGTIYIGRIMAGVLIGILFSRFLSSILSEIWGWKSIYIISSILMALSGYFLLKNYSTPESTEKNTVKNYRNILFLNITEIIKNDIIRHYCFNAFVIMFVFSAFWNNISMFLKSSFNLSQSEIGFFSLIGIAGSSSALFSSYILKKINYKNKILYLLSVIALIIMVSSKKYILSTIICALLIDAFIQLIHVNNQRNLYLSCKGNEARAASCYMTSFIIGGAFGGFVSSYIYTIYGWSMVLMI

SEQ ID NO: 6054 - protein, 55 aa, Xenorhabdus sp.
VTSSGSIARDSLDVVMTKTRSFNPACTQAQAVNNAVMEPPQVASMLKAPPPVPIS

SEQ ID NO: 6055 - protein, 381 aa, Xenorhabdus sp.
MTNQLDEKRLLLRDKAERFAHEQLKTDISASDRNGTFFQKGWQKCADFGLLKMGIPEEYGGEGASLSDLLSIMEGLGYGCEDMGLLFSLNAHLWTVTMQLAIHGTPAQRSRFLPGLLNGTLIGANGSTEDEAGSDVFSMRTHAVRSGDCYILNGMKTYITNAPIADLYVIYATIDPTLGPLGITAFLVESSTPGIEVSQPLEKMGLRTAQMGRVIFKDCRIPADAILGREGRGIKIFESAMEYERGCILATVLGAMRRSLDGCITHARTRKQFGQPIGKNQAISHRIADMKVNLDAARELVYRVGRLKDAGKDATMEAACAKLFVSETYTQLSIDALRIYGAKGYLADSHAERELRNSIASVIYSGTSDIQRNIIANGLGL

SEQ ID NO: 6056 - protein, 521 aa, Xenorhabdus sp.
SVLRHPEACAVIGSDDSTMSYKQLSDAADQVATFLYQKDVVMGDRVGIFMHKKPQTLAAIFGVLRLGAVYVPADVNSSASRAFAVFDNCHVRCILTDPESAAYLTQVAPHFQFQIIVIQAIGEKTSGALQVRDILSIEKRSTEKSEKEPDYPRGTPDANRPAYILYTSGSSGIPKGVVITHRNSVSFVEWASDFFRVTAKDQISSHAPFHFDLSIFDIYVSVKNGACIHLIDTDLAASPRHLASFIARRAITIWYSAPAILGILAEQGQKGHIPNQLRLVLFAGEVFPITKLRKLMNLWPKADYFNLYGPTETNVCTVYQVPAPIPENRLESLSIGSPCTHCETIVVNEHLQLVPEGESGQLFVSGDSVFAGYWNDQEKTAQSIFYLNGKCWYNTGEVVRSSPEGYIFMGRRDRMIKRHGYRIELDEIESCLITHLKLSDSAVISTEIDGEVIITAFLVSYYPQLSLTELSQYCHNRLARYMLPDYFSYLPELPRTSTGKTDYQFLKQQFLEQRNHDKSTG

SEQ ID NO: 6057 - protein, 49 aa, Xenorhabdus sp.
MMRLVSFIEDEFNIIVGVSDPRIRFTTIREISRYVVEKKVADNSSEEGK

SEQ ID NO: 6058 - protein, 357 aa, Xenorhabdus sp.
MQAAGIQAIAVYLPDEVRTNDWWCEDMPQEQSIIVAGARGVSSHRKINPYDAAMERYLDDPFFGSVERRIAATNEGSVELGVKAAHRVLGAAGVSPAEVDCLISVSMFPDRIGSGDAGYLAQLIGTGGGAFNIEATCGGSMTALLTACAWVQAGLKERVLVITTSRLSRAIEPDDVTLRLCGDASAAFLVGPVEAGSGLLGAESLHTGKTCGTWLLDAVEDTSGTTPLGQKIRLRVDPSISHVLRATAEEYLVQTTKGALAKAGLELNDIDFVVVNTPTAWHAEFSASVLGVELNRVVNTFPQVANIGPVLMPFNAYTAAAAGDIKPGDTVLLYGFGGQAEASAAILRWPDVILAPL

SEQ ID NO: 6059 - protein, 142 aa, Xenorhabdus sp.
MDRKAVLMNLKSWLKPSGLFCAYKYDFPLVYGPLRDYIEKELVTRWAKYRDPRLTQYDNTLELMSECSHLYDLQREVFANIIFLSPEEVVLFFLSTSYVTHYIEQEGGELYFNEFMRKVIEIGGTESVAVNFDIHAFTAINR

SEQ ID NO: 6060 - protein, 111 aa, Xenorhabdus sp.
VRCCMSISLTESAAQRVLAFLDNRGKGVGLRLGVRTSGCSGMAYVLEFADTVNDEDQIFEDKGVKVIVDGKSIVYLDGTELDFVKEGLNEGFKFNNPNVSGECGCGESFNV

SEQ ID NO: 6061 - protein, 163 aa, Xenorhabdus sp.
VRYAIDRQQLATRYQELQRQFHPDRFANQPEREKTLALQQAATINDGYQTLKHPLKRAEYMLSQQGFNLSSEQHTMQDTAFLMQQLELREELDTIEHSAEPDAALAGFSSRLNKMIKTRSEQMEKQLDAEQWSIAADTVRKLRFLDKLQQQVEQLEERLLDDF

SEQ ID NO: 6062 - protein, 615 aa, Xenorhabdus sp.
MALLQISEPGLSAAPHQRRLAAGIDLGTTHSLVATVRSGQAETLADSENRHLLPSVVQYCKDEIQIGWQARQQAAFDPVNTISSVKRMMGRSLADIQQRYPNLPYQFQASENGLPLINTAAGLVDPIQVSSDILKSLAQRAEETLDGKLDGVVITVPAYFDDAQRQGTKDAARLAGLHVLRLLNEPTAAAIAYGLDSGQEGVIAVYDLGGGTFDVSILRLSRGVFEVLATGGDTALGGDDFDHLLADWIREHAGITDTNHGLQRQLLDVATQTKIALSDADSVSINFADWQGNITRTEFNELITTLVKRTLLACRRALKDAGVTADEVLQVVMVGGSTRVPLVRSMVGEFFDREPLTSIDPDKVVAVGAAIQADILAGNKPDSEMLLLDVIPLSLGLETMGGLVEKVIPRNTTIPVARAQEFTTFKDGQSAMSIHVVQGERELVADCRSLARFTLRGIPPLPAGGAHIRVTFRVDADGLLSVSALEKSTGVEASIQVKPSYGLSDEEIARMIKDSMSNAQEDIQARKLAEQKVEAARVLESLTGALEKDADLLSQEEHAAIDAAVQVLIESAQGTSPEAIESAIKQLDKQTQEFAARRMDTSIRRALAGHSVDEI

SEQ ID NO: 6063 - protein, 111 aa, Xenorhabdus sp.
MPKIVFLPHNELCPEGAVLDAKEGESILDVALRNGIEIEHACEKSCACTTCHCIVREGFDSLEESEELEDDMLDKAWGLEPESRLSCQAKVADEDLVVEIPKYTINHAREH

SEQ ID NO: 6064 - protein, 64 aa, Xenorhabdus sp.
MKWSDSREIGEALYDKFPDLDPKTVRFTDMHQWICELDGFDDNPEKSNEKVLEAILLVWLDEFE

SEQ ID NO: 6065 - protein, 433 aa, Xenorhabdus sp.
QIMPITLSYEPAKACWGEKALISSNDQGMMIHMSGENSDINSKLALIQRAGRKINGQGIYNVALAGEGWDLEKSWAFWLGFRAPKGLRTIEWPQLNVEEKQELEHRIKFIDWVRDTVNLPAEELGPEQLAQRVIDLINNVAPDAISYRIIKGDALYEQGYVGVHTVGRGSSRVPVFLELDFNPTTNKNEPVFACLVGKGITFDSGGYSLKPSNSMSAMKSDMGGSATLSGALALAISRGLKQRVKLFLCIADNMVSGNAFKLGDIIRYRNGKTVEVMNTDAEGRLVLADGLIDASAENASLIIDAATLTGAAKMAVGNDYHSVFSFDDQLAADLLVAADTEHEQFWRLPLAEFHRNQLPSNFADLNNIAAPSHTAGASTAAAFLSHFVENYKKGWVHIDCSATYRSSAVEQWSAGATGCGVRTIANLLLTKAK

SEQ ID NO: 6066 - protein, 141 aa, Xenorhabdus sp.
VLPDFDITDSDEDDPHARERVSELLDQWNIRQTGEQGNQPLDIYIRDSDGEVIGGLVGRTSLGMLFINYLYLPDELRSQRLGSVLLRKAEEKARQRGCHAVTLYTMSIQAPEFYLKHGYTVFGEVACKPAGNARIFMYKLL

SEQ ID NO: 6067 - protein, 90 aa, Xenorhabdus sp.
MAHDKEQDEKPNLLIGLELSGIQADSDINILIQTAGEVACEHLNEDESVDFCLLDEKDGGISHYLIQHTQPFYQRKLGSWLRETIPVLNQ

SEQ ID NO: 6068 - protein, 910 aa, Xenorhabdus sp.
MVVTLFACFALGILSGCDQSQDNEKSIKPETSASPAPSEITDTASRGSHTPETQSPAAQSLPRQSLEEQYTGKDVTILDASEVQLDGASAMVVTFSVPLNPDQNFAQRVHLVDVKSGKLDGAWELSDNQMELRLRHLPPNHQLILTIDEGLQGINGRSLFNVYEKKFQTASIQPAVGFASKGVLLPSKLAEGLPVLALNVDRVDVNFFRIKEASLPMLIARGRYLRGITSWDSERLLENADLVYTGRFDLNPTPNTREKLLLPLNDIKELQKSGAYLAVMQQAGKYAYTNPAILFTRSDIGVSMHSYLNQIDVFTQSLEQGSGLKGVEVRVLDINGQLLAKNTTDSNGHATLEKSSKAALLLATQGEQVSMIDLSSPALDLSEFDIGGEQGYSRQFFVFGPRDLYRPGETLIVNGLLRDADGRLLKPQPVKVDILKADNQVARSFVWQPENGLYQYRYSIPQSAETGMWSLRLDLGGNTPRYYKFNVEDFMPERMALEIKGNTDSQPIQKNESVNFSITGRYLYGAPAAENRLQGQLFMRPARDAVAKLSGYEFGSSKEEELSRTLDEFDLVLNSEGKTNITVGEDNWRYVSSPVRIAVQASLLEAGGRPVTRHAEQAVWPAEKLVGIRPLFNKKSNYDYYADRYESRYNVNENSLAEFEVVYADANGKKYATNDLRARLIYERRDYYWRWSDSGGWDSGYDQKDLMMADEPVQIVEDGTAKISFPVKWGSYRIEVVNQKNQLITSLNFWAGYSWQDNTEGTGAVRPDQVKLSLDKPAYKPGDKVKLHIAAPQAGKGYVLLESSDGPLWWQEINVSAQGLDIDVPINQLWARHDLYLTAVVVRPGDKSRQATSKRAIGVLHLPLMDEGRKLDLTLSAPDKIRPNQDLSVKIKVTPQKGRELPKQVYVLLS

SEQ ID NO: 6069 - protein, 516 aa, Xenorhabdus sp.
MEISIRRAVVKNFLGNSPDWYKLAIIVFLIINPLVFFYVSPFVAGWMLVVEFIFTLAMALKCYPLQPGGLLAIEAVLIGMTSPKQIGHEISNNLEVILLLIFMVAGIYFMKQLLLFVFTKLLLSIRSKKMLALAFCLASAFLSAFLDALTVIAVVISVSVGFYSIYHRYLSSQNNGSTDLNDDQFIDSEDKRQTLDQFRAFLRSLMMHAGVGTALGGVMTMVGEPQNLIIAKHVGWDFVTFFIRMSPVTVPVFICGLLVCLLVEHFKLFGYGAELPERVRSVLEDYAKKAGEKRTRQEKAQLVVQALIGIWLIVALAFHLAEVGLIGLSVIIMATAFCGITEEHALGKAFEEALPFTALLTVFFSVVAVIIDQQLFTPFIQFVLQSSPASQLSLFYLFNGLLSAVSDNVFVGTVYINEALTALKSGLISQQQYEFLAVAINTGTNLPSVATPNGQAAFLFLLTSALSPLIRLSYGRMVLMALPYTIVMTLVGLLCVEFWLLPATEYLVKLGWVIPQ

SEQ ID NO: 6070 - protein, 144 aa, Xenorhabdus sp.
ALYFQHVMQLQPCVMCIYERVALFGIFGAALLGAIAPKTPLRWLAILLWLYSSWHGLQLAWDHTMMQLYPSPFNTCEFFVRFPSWLPLNEWLPSVFQAFGDCSIKQWSFLTLDMPQWLIGVFAAYLLVGVLVLISQFFRLKYKY

SEQ ID NO: 6071 - protein, 308 aa, Xenorhabdus sp.
EQPEMNTQKEQYNFNKLQKRLRRDVGQAIADFNMIEEGDRIMVCLSGGKDSYTLLSILQNLQKSAPINFSLIAVNLDQKQPGFPEHILPAYLDELGVEYKIVEENTYGIVKEKIPEGKTTCSLCSRLRRGILYRTATELGATKIALGHHRDDILQTVFLNMFYGGKLKGMPPKLISDDGKHIVIRPLAYCREKDIERYAEAKAFPIIPCNLCGSQPNLQRQVIKDMLRDWDKRYPGRIETMFRAVQNVVPSHLSDFNLFDFKSINHDSEIIGGGDLAFDREELPVQPAIDPDEQIDFQADRLDIIEIK

SEQ ID NO: 6072 - protein, 167 aa, Xenorhabdus sp.
MTQTVKFQGSDITVAGHFPQAGETAKEFTLVAKDLTDVALSQYVGKRKVLNIFPSIDTGVCATSVRKFNQHAGELNNTVVLCISADLPFAQSRFCGSEGLSNVVTLSTLRGGEFQENYGVAISQGPLGGLTARAVIVLDENNNVIYSQLVDEITNEPDYDSALAALK

SEQ ID NO: 6073 - protein, 722 aa, Xenorhabdus sp.
MERQFIAHTSSGEELYFKSLKGIERLSEPYEFEIELLSKNRLSDPISLHNTVLTVEIKTPSKQTRYLSGYIEKISYSPFYKYDDRLYLYTATVRPKLSELKKKSGYSIWQEKTVPEIVTTVLQGANINFEDNLIENYRPWEYCVKYNETDFDFIHRLMAHEGIYYYFKHENGNHTMVLVDMPQMHYPMPGYDTIKYFSVGSIFRKLDQEYIYTWNISSSTIPNSFSTDDYDFRKPRAKLQSLTQTSLSSVDSTEIFMWPGRFIKGDQGQFYVRILQQASEAQSELINGEGNVLGMAPGHTFTLSLPNSIKGDDYNDYLITGEQYSFYESDYGSVFEYDSDDDDSDDDNPDKNIVQFEAIPSNVHWKPQAITLWPKATGVETAVVTGPKNKPIWTDKYGRIKVKFRWDKTDKKDDTSSCWIRVATRWAGWRYGSINVPRVGEEVVISFVNGDPDKPFVIGSTYNNENMPPWELPKHETRSGVMSNTKNGKHDQANYLFMDDEPDKELFDLHAERDMNISVEKDKTVKIDGKRTTEIKKEQTDTVTGKANFTYKDNRDTTVNGKDTLTIDKGQQRTIKKGRNTEIDGGDTYKLTGNLTAKIDGNWTQNITGTTLINSPSLITLKSDTNIVMDCPTSIFSSSIGKISATGFSISATGFSASTTHTSVSANELVTSITGISVGVTVINLSKTGVNITKNDVNVAANALAVAQSNIRLIASSLHLFV

SEQ ID NO: 6074 - protein, 841 aa, Xenorhabdus sp.
MQKNHLGVTVMALVDMGLAPRLRPEPELWQLAEKELKTCNGIIDLAMPKSLPEFLATGYAYTHHQTDKTACNVRIKVDQLEKKLAVFGDRYWLGDTSSKPQAFEQMRLDWSRAFGGEGYDDNPHGIGFTPEILENGNKIHRLPNIEAFHKQLLSPEDTPEPASFCPLDFTWPRRFERIGKQYDKEWLENEFPGYAHDIDWRLFNAAPQDQWWEQLPALPVKAAWRIENMHPKKPVQEGRLPAWNVRCFIKRLRLNEEIDEEIVMRQTTVWFFPHLEQMLLIWHGSTRINEDDAADVLQMISALEQQDSPLPASHYLEIARQRMDKEKGVLYTFREKDLIPEGIIGPWIDTESSVESSPIQESVLRRQKLLHEQQAARLAEQGYDINTMIPPTSPVTVPSTSPRLDELPEFMEKIEQEAAQRKAEAELKQTEITAKAKEQGIDTYLSLPESNTKGPEGIYSTRDILRKQQQHTGLSDQELAQIEQSLRDTYFLTVQSQNPALRLKGELSEIIRKRAQKIMEQGGNFSGMDFTGADLSNMDLRGANFSGALLESACFNHSQLDKADFSEAMLARAEFCHTSLSGVKLDKANLVLAKCEQSDFSNTDFKEVQLQEALFDHCQFNHSTFTDLLLRQVFITHCDFHSSQWNNCTLTELELPALSFNHATLNKVTFLKCKLEQAVFDEAQCESCSWVETEVNHIRFCSASLLNCAFVMNTTLNQADFTQATLTECNLRQMPLVQARFHSAMLNNSDLSEADCRSADMQHLNATKSIFIRTDFREALLNNANLMGALMQKCSLHGTDLHGANLFRADMSQSVIDDSTQFEGAYLQGIKTLPKRDKEVI

SEQ ID NO: 6075 - protein, 327 aa, Xenorhabdus sp.
VETIYGSAFKDSNAVYACQLNGKGGTTGFSENVSATAGQPFWQHLDYKNQASYQWIMKTNQLPVPVKEGLVGESIRPKLIRTGEGAMIMLRTINRNDNARSDHLVSFRIYINDQIIISSSHRKVYSVDQVLADLNNGVGAKNSGHWLVEIADAITDEVNDFIEELHDNLIEFEDNILEQKIPGRGELVLLRKQLIVLRRYMAPQRDVLTRLSSEKLPWMSDEARHLIQEVSDRLGRGLDDLDSCIARTAVLADEITSIMADAMNRRIYMMSLLTMIFLPSTFLTGLFGVNLGGIPGNKDEFGFGLFSLLLSLLIAGFAWWLKRSKWL

SEQ ID NO: 6076 - protein, 543 aa, Xenorhabdus sp.
IFMHNFTLFPSVLLMTGLSLPLSVYAADVPVGTQLDPHQELVRHLKDEPASLDPIKSFGLIEAQVLRDLLEGLVNQDAYGKPVPGVAINWKTTDNKTWIFTLRQDARWSNGDKVTASDFVYSWQRLVNPKNASSFSWFAALAGIQNAQKIIDGKFPPEKLGVEALDAYTVKVTLDRPVPYFPNMTTHFSLYPVNKQSVEKYGNDWTKVGHLVGNGAFMLTGRVVNEKIVLSPNPYYWDHKKTVLKKVTFVPINQESHAVNRYLAGDLDITESFPKNMYHKLLHDIPGEVFTPDQLGTYYYAFNTQRAPTNDIRVRQALAMTINKNLVAEKILGTGEKPAWHFTPDVTAGFHPEKSQQQMITQQERDRRARLLFKEAGYGPDHPLKLSLLYNNLENNQRIAIAVSSEWKKKLGVEVKLVNQEWKTYVDNRNTGNFDVVRASWTGDYNEPSSFLSLLTSTHSGNLAKFHNSAYDALLKEASLETDDVARNRDYNQAEKMIEEQAPIVPIYQYTNGRLIKKWLKGYPITNPEDVAYSHTMYIIKKH

SEQ ID NO: 6077 - protein, 370 aa, Xenorhabdus sp.
MRVADFTFELPEELIAHYPQPQRSGCRLLSLDGETGELTHGIFTDVLNKLEAGDLLVFNNTRVIPARLFGRKATGGKLEVLVERMLDDKRVLAHVRASKAPKEGTELILGEDKAPDGNQIVKATMLARHDALFEIRFDDERDVLTILDEIGHMPLPPYIARPDEESDKELYQTVYNERPGAVAAPTAGLHFDEPLLAALREKGIEMAFVTLHVGAGTFQPVRVDTIEDHIMHAEYAEVPQNVVDAVLACKARGNKVVAVGTTSVRSLESAARACQDGLIAPFFDDTQIFIYPGFEYQVVDTLITNLHLPESTLIMLVSAFAGYKNTMSAYKEAVTEKYRFFSYGDAMFINRNSIAAKEMVEVATDIDQSE

SEQ ID NO: 6078 - protein, 374 aa, Xenorhabdus sp.
VKFELQKTDGHARRGRLIFDRGVVETPAFMPVGTYGTVKGMTPEEVKDTGAQILLGNTFHLWLRPGQEIMKLHGDLHDFMQWHGPILTDSGGFQVFSLGAMRKIKEEGVHFRNPINGTPVFLSPEKSMEIQHDLGSDIVMIFDECTPYPADWDYAKRSMEMSLRWAARSRQRFDELGNKNALFGIIQGSVYEDLRDVSVKGLVEIGFDGYAVGGLAVGEPKEDMHRILEHVCPQIPQDKPRYLMGVGKPEDLVEGVRRGIDMFDCVMPTRNARNGHLFVTEGVIKIRNAKHKEDTSSLDEHCDCYTCRNYSRAYLHHLDRCNEILGARLNTIHNLRYYQRLMAGIRQAIEEDRLEQFVEEFYQRIGKPVPPLNV

SEQ ID NO: 6079 - protein, 112 aa, Xenorhabdus sp.
MSFFISEAAAAAGAPAQAQGNPYSLIIMLVVFGLIFYFMILRPQQKRTKEHKKLMDSISKGDEVLTSGGLVGRVSKVSETGYVVIALNDTTEITVKRDFVAAILPKGTMKAI

SEQ ID NO: 6080 - protein, 615 aa, Xenorhabdus sp.
VLNRYPLWKYLMLIAAILIGLLYALPNLYGEDPAVQITGARGIAASEKTLDQVRNVLDKDHIQSKSIALENGAILARFNSTDVQLRAREALVSALGEQYVVALNLAPATPVWLSKIGAEPMKLGLDLRGGVHFLMEVDMDTALSKLQEQNIDSLRSELREQGIAYSTIHKAENYGVEIRFRDNDARSKAEDYLEPRHRDLVFSTGNNSTLKAVMTDERLREARSYAVQQNITILRNRVNQLGVAEPLVQRQGADRIVVELPGIQDTARAKEILGATATLEFRLVNTNVDQSAIVSGRIPGDSELKYTRDGNPVVLYKRVILTGDHITDSTSSTDENGYPQVNISLDSAGGTAMSNFTKDNLQKPMATLFVEYKDSGKKNANGRAILAKHEEVINVATIQSRLGNSFRITGISNPNEARQLSLLLRAGALIAPIQIVEERTIGPTLGLQNIEQGLEACLWGLISSVLFMVVYYRKFGLIASSALLANLVLVVGVMSLLPGATLTMPGIAGIVLTLAVAVDANVLINERIKEELRNGRTVQQAIHEGYKGAFSSIIDANLTTLITAVILYAVGTGSIKGFAITTSIGVATSMFTAIVGTRAIVNLLYGGKRINKLSI

SEQ ID NO: 6081 - protein, 229 aa, Xenorhabdus sp.
VAQDYTVEQLNYGRKVIDFMRWDNVAFTISLLLLVASIAMMATRGFNWGLDFTGGTVIEINLSKPADLDKMRESLAKNGFADPLLQNFGSSRDVMVRMPPATGNAGQELGNKIISVINADIDKDAVVKRVEFVGPSVGSELAQTGAMALLVALICILIYVGFRFEWRLALGAVIALAHDVIITLGVLSLFHIEIDLTIVASLMSVIGYSLNDSIVVSDRIRENFRKIRR

SEQ ID NO: 6082 - protein, 203 aa, Xenorhabdus sp.
MNFLAHLHLATLSESSLLGNLMADFVRGAPEGRFAPDVVSGIRLHRRIDSLTDSHPLVTEARTLFRSEYRRVAPITLDIIWDHFLSKHWNKLEKNYSLPEFVQLARNQIEPHLSVTPEKFQELNQYLWSQNLLIRYADLTCIANVLQGMARRRPKLSALAGSYQDIEEHYSDFETLFWQFYPQMMALVMNNSLPGQEISPEPL

SEQ ID NO: 6083 - protein, 98 aa, Xenorhabdus sp.
GYASQKRERVLKEQGYRVHIQRKAARNKPLSHCQKGRNKKIAKTRARVEHIFGSLSQMGEKIIRTIGQLRANFAMTMKATCYDLQRLVYFGKSGIHAF

SEQ ID NO: 6084 - protein, 97 aa, Xenorhabdus sp.
MVTVEVKCRFCQQTGFVKKWGKGDARHQRYRCFSCKQTFQLEYAYRACQSDIKEQFVELAMNNAGISDTARALHISINAVVRTLKTSIPMRNNSFAG

SEQ ID NO: 6085 - protein, 384 aa, Xenorhabdus sp.
MGQGLMKDESLPYLVTNFDQNKYKVELIEGKRTQWRAKVWINCELIPRKISIEGIENSGIIIKGPPCGATITSMKDSQIIPDGKYDISGLIHTKILNDAKKIKVSISSFDDPDYTHTSEPTKEYTPDVDLNSGTWSIKGLTAKCFNYYKASVIFNQNRKYDNNLPGKKEIKFGVARCPVKITKPVMHEFITSTDDNPKQIVIEGKVTEKTPLDVIANYYSNGEHSLPILSRIGNSWQTKISNAPAGFIKIKTKNTGTPNVPIKNSNDEVTILKSKDFSVKYEIIDDVFIHIYGTSLPNNDKKISEFKETLHPKIIIFSDGVKSEEIIPDEKGNWCSDNEYYAKRGVYLFTIHETSDNENYPARKDKTLECTGGNDHMTCIEKNN

SEQ ID NO: 6086 - protein, 925 aa, Xenorhabdus sp.
MKRIWISNPDWGEKLSKRRKSIPVEGFGRPSAEINLRYSIDHKEEKSTKCKVGEDSKWKCNIPYDSYFTDIIHEDHEYEITITAEELNGNDKPWESDTITATIPNAEQEISIIYPSDKSIVLTKNFTIRGYADPGSEIILTLSANPKYGKEDYTQDKLCAGLNNNELIKTGENGLWSCSINTNINLKNLGKDDNYYINAVQKYKKPKKSKKSKKSKKSKHKEIKDKVSISLHPEDYSILNIEPNKNKKGSIYRKILEYNATYANNAKLVCIFNGYYANCKNNPRGEDNFHLRNSFASKEDFNSGKKQFLYISAIQKLENVDPIDPKLWYLQFFESEGGYLMPSFNKEYKMESPTEIVSTDIQNEKFDGLGGDNQRYTLSNDDILLPSEYSICMKKSNHSPSNTPQCNSDDNDKNIYVKIPLKEGKYFSEIPIQYSEFGKRHDFPKWSLSLPPELKNGVYYIEVVDRFLPQGLKIEPHIFSDSLSKAYFQIIAPDVNFTSPENISDTVTTVSGTASIPGETVNVRKRKLTLSRGASGGDTSDIFPDTICEDAVVSDNGDWGCWTPVTFTEGTYELTAELMKGNKVVATNTEVVTVEEKEPDEDKPEIDNPANSPPIDPDGGLISLFGIFSAAAGAAAGLATGLAGAASGAVIGAVSTIAGLAIPHWGLNIDTSKLRGGEAYTLVIQETKDGNKIGAPIEWHFTMPIRITEPQKNAHYRINSAISIQGEGTPGQQILIASSKLFLPPKETVLPTASDTLICQTKVDANGKWVCPNNPVMTAKQEGIFSLYAAQYQEIHSEDLTIHHYKRTSEVTRQYEITQNRISITAPKQNAKFHRKPFDITGIGEPGAQIHIGKKGNNKACDTTVIASGKWSCGPYLFGKGKFTVSVEQFINYELHSTAQVSYEIQPANGASSVIYLHFNHHSKY

SEQ ID NO: 6087 - protein, 188 aa, Xenorhabdus sp.
VTQGIPAVFLDRDGTINIDHGYVHEIDNFQFIDGAIEAMLELKKMGYALVLVTNQSGIARKMFTEDQFLQLTEWMDWSLADRGVDLDGIYYCPHHPEASDEHYKKTCDCRKPQPGMLFDAQKTLHINMAASYMVGDKIEDMLAANAAGVGTKVLVRTGKPVTIEAEQSADLVINSLSDLPNVIKNRQK

SEQ ID NO: 6088 - protein, 95 aa, Xenorhabdus sp.
CPKVRGIEIEADVVLKATKVDGVYSADPAKDPEAVLYNKLDYQDVLERELKVMDLAAFTLARDHNLPIRVFNMNKPGALRRVVMGENEGTLISHD

SEQ ID NO: 6089 - protein, 199 aa, Xenorhabdus sp.
MYGLENNQFPRVYNVINEIKKDAQDRMEKSVEALKNQISKVRTGRASPSLLDGISIEYYGAATPLRQIANVVAEDARTLAITVFDRSMTPAVEKAIMASDLGLNPSSAGTIIRVPLPPLTEERRKDLIKVVRGDAEQGRVSIRNIRRDANDKVKALLKDKEISEDEERRSQDDIQKLTDTFIKKIDEALANKETELMEF

SEQ ID NO: 6090 - protein, 379 aa, Xenorhabdus sp.
VVRKNPDKFRVVALVAGKNSGVMAQQCLEFQPQYAAMADEHSATELRRLLQEQGCQTEVLAGKEAICDLAALEDVDQVMSAIVGIAGLLPTLAAIRKGKQVLLANKESLITSGRLFMEAVNQYKAQLLPIDSEHNAIFQSLPESVQHNLGNATLKDHGISSIILTGSGGPFRKTPLEKFSSVTPDEACAHPIWSMGRKISVDSATMMNKGLEYIEARHLFNASADEIEVLLHPQSVIHSMVRYQDGSIIAQLGTQDMCTPIAYSMAYPNRIESGAKPLDFNELSTLTFEALDYRRYPCLKLAIDACHEGQAATTALNAANEETVSAFLQNQIRFTDIAVMNRQVVEKLNLPEPQSIEEVLEIDHIARTLAKEAIGAFTN

SEQ ID NO: 6091 - protein, 236 aa, Xenorhabdus sp.
RHVAIIMDGNGRWAKKRGKLRVFGHRAGIKAVRSAVSFSVKNNIESLTLYAFSSENWNRPQQEVSSLMELFVFALDNEVKSLHKHNVKLSVIGDISRFSSRLQERIRRSVELTAGNTGLQLNIAANYGGRWDLIQSVRQVAEKVRANQLEPEDITESTVSSFMSLSQQSDVDLVIRTGGEHRISNFLLWQIAYAELYFTDILWPDFDETAFEGAIHAFIKRERRFGGTPDDAEVGS

SEQ ID NO: 6092 - protein, 250 aa, Xenorhabdus sp.
LAAWEWGQFAGLFTQSKRIALAVLCAAGLLALQHSLADFTHLTEKPQILYLLWAGMLWWVVAVVLVVAYPASASIWKSSVILRLLFGFLTIVPFYCGMMVLRTQGYENNTYNGAWWLLYVMLLVWAADSGAYIFGRTLGKHKMAPKVSPGKTLEGLAGGLLTAALISWLFSKFAPVPVVPENLLLISAVVVIASVFGDLTESMFKRESGIKDSSQLIPGHGGVMDRVDSLTAAVPVFAGLVMLVSSGFGL

SEQ ID NO: 6093 - protein, 451 aa, Xenorhabdus sp.
LMDILWNLAAFIVALGVLVTVHEFGHFWVARRCGIYVERFSIGFGKALWRRTDKQGTEFVIALIPLGGYVKMLDERVETVAPERRHMAFNNKTIGQRAAVVSAGPIANFILAIVAYWLVFVIGVPSVRSVILDVKPDSIAAQANILPGMELKAVDGIETPDWNSVRLALISKVGESSVSLDVAPEDSSESIQKTLDLRHWAFDPSRQDILLSLGIMPVIPYPSSQIEKIYPGSAAEKAGLQSGDRIVKVDGQNVDIWHSFASYIRKNPNLPLKLDVARAGSMITLSLIPEAKKLSDGREEGFAGVELKIIPLADEYRTVQQYGPFYSVYEAGEKTWQLIKLTVNMIGKLIVGDVKLDNLSGPISIAKGAGVSADSGLVYYLMFLALISVNLGIINLFPLPVLDGGHLLFLAIEKIKGGPVSERVQDFSYRIGAILLVLLMGLALFNDFSRF

SEQ ID NO: 6094 - protein, 802 aa, Xenorhabdus sp.
MAMKKLLIASLLFGSATAYGSDGFVVQDIHFEGLQRVTVGAALLNMPVRVGETVSDEDISRMIHALFATGNFEDVRVLRDGNSLVVQVKERPTIASITFSGNKAVKDGMLKSNLEASRVRVGEALDRTMLSNIEKGLEDFYYSVGKYNATVKAVVTPLPRNRVDLKLVFSEGVSAKIQQINIVGNKDFSTSELLDSFQLRDDVPWWNLTADQKYQKQKLEGDLEKLRSFYLDRGYARFNIDSTQVNLTPDKKGIYITINVTEGDQYKISGVDVSGNLAGYQAQITKLTTIKPGSLYNGTEVTHIETAIKQLLGRYGYAYPRVMTQPEINDADKTVKLHINVDAGNRFYVRNIRFSGNTTSKDSVLRREMRQMEGAWLGSDLVEYGKERLNRLGYFETVDVATERVPGSPDQVDVIYKVKERNTGSMNFSVGYGTESGMSFQVGVQQDNWLGTGNAVGISASKNDYSTSADLSFTNPYFTVDGVSLGGRIFYSDFRADDASLSNYTNKSYGTDGSFGVPLNENNSLYFRLGYVHNSLSNIRPQLAMWRYMEKMHKKPDFTDKIRFDANDVTMTVGWSYNNLDRAFFPTSGVKAGLDTKVTVPGSDNQFYKVTLNSSGYYPIDDDRTWVMMGRTRLGYGGGIGGKELPFYENFYAGGSNSVRGFRPNNIGPKAVYLGKGPGGQPKVHSRGSFQDAVGGNAIAVANFELITPTPFLDAKYANSVRTSLFVDAGTVWDTSWSNSYAGVNYPDLPDYGKPNRIRVSTGIALQWLSPLGPLSVSYAKPVKDYKGDRTDQFQFNIGGTW

SEQ ID NO: 6095 - protein, 139 aa, Xenorhabdus sp.
VKKVLCAVSLGIALAFSAGVQAADKIAVVNIAEIFQQLPAHEAVAKQLENEFKGRVSDLQRMESDLQSNIQKLQRDGSTMKASDREKLEKDVMAKRDEFAKKAQSLDNDSRRRQMEERNKLVNRIQDAVKVVAGKEGYT

SEQ ID NO: 6096 - protein, 173 aa, Xenorhabdus sp.
TTFIIYLVGTISLLLLVYPYSQWISKLSIGQLKCSTSLGLAASVIILYLVTYGIENLFGIPTESFVSRLTNQSGGALLATYIMILVFAPICEEILFRGMFLGMFNSTHHWILWTGVFITSVLFTSIHIQYEHISTFVEIFILSLILAIARIRSGGLLLPILLHTEASLIAVIF

SEQ ID NO: 6097 - protein, 646 aa, Xenorhabdus sp.
GNTDGNQTYYTFTLKPEMWRMTLNQDSRIYQHLSVPDILKKLLSEHRIKADSKFYDSAAYHAPRDYITQKRESSYEFWCRLAAEEGIIFWFEENQMFYSNSHLGMTAGLPLRYNAQPDTDETDSTVWQWQYGEYLCPDEFIHKDYNYLRPSQPMQTKATSAQNSQHSVFESYGRFQWSTEGQPLGEIRLNRLNSESKLGEARSNCIKLRPGKIFTLSAHPSDPMNDRWQVVSVTHHGHQPQAAGIGGEGTTLTSDMTFIPGVDDWRPPYRYKPLADGDELATVVGPEGEEIFTNELGAIKVHFHWNRYDKPGDGSSCWVRVAQGWNGNGFGFMAIPRIGQEVIVSYLNGDIDRPIVTGCNYNGRNSPPLDLPGQKTRTTFKTHTHKGEGFNELRFEDAKGSEEVYIHAQKDMNTKVLNNRTTHVDVDHKERIGRDQTLTIVRDQFEDIQRNRQTVIKQDDDESVSGHQTLLVEKNQSKTITGQQSVKIGKSQLLDIADNQEVRVGKHIVLQSQSGQITIGNSGGQIIIDPTGAITISGTSISMTEHAAGKAGSQALFDYSGRYILTNSKNGNKPLTNTLYQIKTPSGIVSGRTDAAGRTAIVQTQQADTLEFSLPEEQKKKKTKKLYHVGDNQPVDYIMEFKEESK

SEQ ID NO: 6098 - protein, 486 aa, Xenorhabdus sp.
MEQIEFPKDEDECYLVKKAALAIWAPKIAIGKKGIFSLKQAAMSQFIKIEEKVYDWLWPYKAEVTFYMRGYRTPLPKLTNNAEKKVRYGGNLPHSESWFPNLSAKDIAKHGITGFRRPDIILVKNEQLRWPGRDAEYLDGTAHPDNLKILIEVKFPGDSMSEGQKRDYPLIATKERFGIFVVEDNRGSKEWETLSEEAKAVEMDNIRKHVALFGRLFSPVGDGNTPPVSLPIPTQPEIARYTPKNLPLVSEKPWQHKPVFSIWMALSHDQTVPPLIMPPNESSFVERAKEYYHQAAQWVEEGFIYTKDMIVHSWEWTWDLTASGFTYLSDKTRAALAACGAWFRESGKWIADEIIDPVTKKLSYAIHWVCEKTGEIVHLTEAKIKEAVETVYQYTDLTIDALKQVEWYQIAADLGDGTIQLMVKIGEEIMTIIAAIIVVAAIVLLAGIIIWAGSIVGGVASAIWATLTAAAAGIAALTTLTAATAS

SEQ ID NO: 6099 - protein, 295 aa, Xenorhabdus sp.
VSDAKKANDAPQYIMRYLDSWETEGNNASSYLCLVLPWDTLTTDKGQTEFNEWLAFLCEQLSPDHGECGYTLVLPRDYEEYMPQEYQLAIRYPAMQVNSNIFIDAMYFFNSIRSINWITLLSTRFIKRLGGEQWVRNKLSAYPDITITEYGNGLIIRAGEYPDLTPLPASVPESYFAINELTRPIRYTLKDEGYSLHTYGEGHFTGTTSALWYARYDRGPLQVDPLMAGEPARVDGYWTTQGREGLENVILQGDIAPDVEGNAPGTTVWRLVRQIEHDDDKDLRELEAQQNAGNH

SEQ ID NO: 6100 - protein, 50 aa, Xenorhabdus sp.
MFQTHAEQWADETFSRANLGDSRRTKRLIKFTGSLANHIGQSIGQSLKTP

SEQ ID NO: 6101 - protein, 190 aa, Xenorhabdus sp.
MALAMVSLINTVNNLAERDQYQDRELQLVIDEGHITTTNPLLSPYMTKVVKMWRKLGAWLWLATQNLADYPDTAEKMLNMAEWWLCLTMPPDEVEQIARFKKLNEEQKAVLLSASKLPRCYTEGVVLAKKIEALFRVVPPSLYLALGMTEKEEKAERRALMREHQCSELEAAVFVARRMDMARGLKAYPI

SEQ ID NO: 6102 - protein, 421 aa, Xenorhabdus sp.
MMPEGTVVTLTIVAQAQDTLEESFTRLAKNAVGENTESLRARQDVQAVKELLGRRHKLYRSALTFLVRGQDLDNLNQRVHQLSSTLLSAGLQPVRLEFSVSPLNAYLRALPMGFNPQKDKKHGYSRLTWVQHLAGLLPVTGRSTGTGHPGFSFFNRGGAPLTFDPMNKQDRTQNAHLLLFGPTGAGKSATLCASLVQLMAIHRPRLFIVEAGNSFGLLADYYASLGLTVNKIGIKPGCGVSLALFADAHQLLKLSPKQLRINEADIPETDEAQEDGDEQRDILGEMEIAARLMITGGEKKEEERLTRSDRGLIREAIMLAAQTSYEAGHQMVASDLQTALYAIARNHQQDEHGQPLITAHRRARADEMAGAMSMFTQGFEGELFNQPGTPWPEVDVTLIDLGTAGARKLLGPDGTGDGVTD

SEQ ID NO: 6103 - protein, 371 aa, Xenorhabdus sp.
MENPNALHRPGKLRETDEAAIYRANPSIIDYLPWVEYLEDGQCLLLDDGVSVGAVYQIEPVATEGRPAARLIEIRDQLEDAIQDSLDEDDMSPWVVQFFCQDEDDPDNYLNTLRDYVKPWAQGTAFTDAFLAESARHLNSIAQPDGIFQDSLITGQPWRGQQRQTRMVVYRWLPAHKSKAHHQTVSSVAALNQVCERLVSSLASAGIVATRQDGGQIHSWLLRHFNPAPDWGMAKADFYRAVRYESPTQPDLPVNNDFAESLWFTPPVSDPDNGVWWFDGLPHKAVPVERLRRPPEPGTLTGGSETGRPYQCADGYDAGRHGGHVDHCGASTGYTGRELHPTGKKCRRGKYRITARPAGCTGSEGITGATA

SEQ ID NO: 6104 - protein, 133 aa, Xenorhabdus sp.
MRKITYAIVLGLTGLLAGCSTSKDTLLPAGEQTVLAMWQGNQAGHSATQARQTLRRALTPAERHRASEEPTHYNRSAEHEISQQFPRLLNPDMVMYVYPHLVAGKTPIPGYSTVFPFYQQVQYALPGERTEAW

SEQ ID NO: 6105 - protein, 95 aa, Xenorhabdus sp.
MTPQAEPTSVQLDWRSFRTKSSQLYLFSGNESRLLNDGDFTVFRLTEFQWQSMLAGNSEVEHWECLPFTLSELAVHPEFATFTLICSPEAQGCEK

SEQ ID NO: 6106 - protein, 277 aa, Xenorhabdus sp.
MGNGKTAAQFPTSFLSEQPTTVKNHPQVPSAKADNENPVYTLPENATLVGSQAMTALLGRVPVNGTVTDPYPFKILIGKDNLTANGIELPEVEGAVVSGSASGDWTLSCVRGQVNSITFVFQDGTVRTLPGRGQNQQGIGWLSDENGIPCISGERKSNASTYLPTLFALSAMNSAGNALNESQQTAQTNGAGGITSALTGNAGQAALGKAVAGGMNEMSEWFKQRYSQTFDAIYVPPGAHVVVHITQSLAIDYEKTGRKVRYGFSEPTQSVTQEALD

SEQ ID NO: 6107 - protein, 125 aa, Xenorhabdus sp.
  unsure (1)..(125): unsure at all Xaa locations
AQXLYAPLRTVEPVSGIQPVNLHLAASITTLYPSEPVEVTPLAGWRLHHHTVMALKLRNTAKRIIPLDPRALQGHFVTAAFQHRWLGKSGTPEDTTVLYLVTQGAPGNALIPEPVSVKPGGRDAA

SEQ ID NO: 6108 - protein, 3637 aa, Xenorhabdus sp.
IISQFASSPFELAQSPLLRLAGLTLRPHNHLIVLVFHHLIVDEESVRQLWDELLENYTQLQARKELTIRSSHYGQREHVRIQHQRVNGKTGMAAREYWQQQLAGTLPLLQLPYDFPTPAARSYRGRRIPFSLPSAAHKQIETLAYQYGVTPYLILQAGFIAFLARYSRQSDILLGTPVSNRHYSEEQKPVGLLLSLLVIRNQVDLGQSFEHLLEQVKSTFIDAIAHQDLPLSQLLLLLKEDSGQTSSGKNGGEDNHHPGVSPLFQTLFTYQNTPVTHKRLGAVQLSPLRHWDVQIAKYELALEMWCEDGELQGVFQYASDRFLPETISRMTENFCYFLSQLMNQPQQAVGRVALLSPGQQQQLTEWNRTERPFSDNIALHQLIERQVQRVPDAIAVEFGQQCLTYAELDQRANQLARFLIQQGVGPEICVGLSVERSLELVICFLAILKAGGVYVPIDPDYPLDRSLHVIEDAGLCLLITQEQFVSRYQDGNVPLFCLETLMPQLSAFSTDNPQADVRAENTAYIIYTSGSTGKPKGVPVRHRGVCNLAETEVEFLAIPPDSRILQFASFSFDTSVWEILMAFCSGSTLLMASRLAIMPGPDLLEQLITRRVTHVTLPASALAALPVADLPDLQVLIVAGEACGPDLLHKWGNNRRFINSYGPTEATVGTTNAELTTDDNQIHIGRPIANSQVWILDEYQAPLPIGVAGELYIGGVGVTAGYLNRPDLTESHFIPDPFSSRPEARLYRTGDLARYRADGNIDYLGRIDQQIKIRGYRVELGEIESALRQYPAISDAVAMVREDYLNASAIVAYILPKAGSELDQAQIESHLNGLLPEFMCPSCYVFLPEFPRLPNNKVDRKRFPKPVRQESEIVAEPAQNDTEQDIIQVWQDLLRHQAIGRHTSFFAAGGHSLLAAKMVAMLADQFRLYFRVSDVFICRTPMRLAEKADLTARVNPLHPETVHEAPLSFAQQRMWFLDQLYPDSCRYHITSIKTFTRTDSLTNTTGNCGDAERIQNSIMLLFRRNPLLNLRLRMEGTTPRQYYSEQLPDCPHHIIEVQNEQEWQQQLQQRAMNMAETPFQLIGQPLYRLLLVTDARQGSALIVCLHHILVDEQSLALLDNELLSLYLTEEYLAEEHLAEENAIQPAAPDYMQFAAWEHSAEAQQIWHSQLDYWRQVYHHLPPVVTFPQQHSERTEDVKAAYHRLPLSAEQTAALRRLAQQQDTTLFTLMMAAFQILLQRYCGEGDATGDIVVGIPVTLRDKPELQSVIGLLLNTLAVRQNVDIRLSFTEFLRSSVQTLNQAMANKDVPFEQVVDAVLPAEKRSLSPLFRIMFVFNAQQQQQCRTGTINSQSINNPEAKFDLTLFVQEMFVQELSQPEMTDSLLLTVEYRQACFAPEMVEQLVTHYVRLLNSLCDTPEQPIYQLPMLSPQEYQQQANELNATAQPLLYQMVHQQFEQQVSRTPQAIALREQDETEFTLSYEQLNQHANRLANDLLIQGIGQGSQVGICLPRSAMLVVAILAVLKTGAAYVPVDCTYPAERARFMLEDAQVARVITNHEQAARLALPAQQCILLNPEPFISEIVTNDQGNIVNPDIVISPEQPAYILYTSGSTGRPKGTIIPHRGLKNYLQHACEYYGDRSRQGNTLHASISFDATITSLFLPLLQGQTLFILPEGDDIPALIQTWQQLPDLTMAKITPAHLELLSQQLSPEQAGRIPLLVIGGESLSASSLRFWRQHAPQVRIINEYGPTEATVGCCIYDILAGEIKGDGVLPIGRPIANTQLYLLDECQQLVPFGSVGELYIGGEGVGLGYFNRPDLTESRFITSPFSSSSQKKLYRTGDLARYLPDGNLLFLGRKDQQIKLHGYRIELEEIEAQLSACQGVVQAAAGMRDVHGRQHLVAYLVMNKRVAGQAVTEIENVRQELSQRLPAYMCPTQWVIQEVLPLTANGKIDRRSLAQIALPEQPDYPHRRMPETALEKQLTEIWQQVLDQQNLGIDDDFFVLGGDSILSLQIVFRGREIGLRITPKMLFDYPTIAGLAAVVTQEATQANNADDKAGNNAQPVQGEYALLPIQRWFFAHHHANPHHYNQSYLYALEPETDILRLEQALALVVNQHDGLRSRFPLTGEQGQSHGRIDEAVTILSIERCRITAIPVRKALLQAAAERQAQLNIEHGPLLTATHFMTTEGDYLLLTVHHLVIDGVSWRILTEDLSHYYRALLAGEKPPLMTKTASLINWSSHLIDYAQSEQAQEEYRFWQQKLNQAVPSLPCDQGEKPFPGLVRESAKYRLALAPSVTTNLVQHTGQAYRTHVGDLLLAALAATLQQWSGSGLLHVDMEGHGRESLHENVDVSRTVGWFTAIYPLLLELPAFCSPDQLIQQVKEAVRQVPYSGTGYGALRYSQPNANHQLPAIPKADICFNYLGQFTRTFHQTPLQGVADMVLDDRYAADNTASYALAVDCYIDEGQLQIEWTYNRQCYRDETINKLAMVMKEQLLLLTEHCVAQTRTTYTPSDFPLASLNAETLRQLQQRYGEIDDIYPLTYTQEGMLFHSMAEQGRGLYHEQLCFTLSQHEIDISRLKRAWQQVTEHYPVLRSRFEMRLASQPLQIVTPNQEVDWRQHDLRSYSRSEAEQHYQILLAADLAEEFTPEQGTLFRITVLQLPDEAIRLLFSHHHAILDGWSVRLLLTAVESIYQHTSHYQQGSQPLNNILPPAPAFRSFIRWQQNNRRACQEYWQAQLADVGAATPLPAAHPLRAASQLKQRHAFRLPAVLSERLAETGRRYRLTINTLVQGAWALLLQHYSQQDECLFGMTVSGRQAELAGIDKMVGLLISTLPVHIVTHHYQTTADWLNAIQQQQREHERFSDISLADLKSACELPEFETLLVFENYPQPKQADEEKNLFRFTQATESTNYPLVLVASFSDGLHGTLVYDTGLYDAATVTRLTRHFIRLLEQLINNMTGRPDDIALLDEREKQQLLTQWQGEALPVFAGNVYSLFARQVQTSPRQTAVIDGHQQVSYAELAQKAEQISLRLHHNRVKAGDRVALYLPRGLDYIAAMLAVSRIGACYMPIDTSYPTERVTYLLSDSQSCLVLTYQALAASLTHDIAALVLDQKTEPLPLNALPPVIDDASALAYLIYTSGSTGAPKGVMIEHHSLINYLTDAAQRYQVTAGTQSLFHSSVSFDATLTSLYLPLLHGGTITVIKDDADIAAIATALQQPSSKDRHLLKITPAHLGVLSEYLNATARSHVHSLVIGGDALSCETVQGWLSDGGDIGVFNEYGPTETVVGCCVHRADKQQDLQGMMPIGLPIANTRLFVLNDDLSPTPFGMAGELYIGGLGVARGYWDRPELTAEKFITLSVPLEGGTQENIRVYRTGDRVCALPDGKLLYLGRRDRQIKLRGYRIEPGEIEAQLMQHPYVQQSALLAYFDKGYSDTAYSGKQEDMQLVACVSLKPEFLKPDSLKPAVNDGIPSDSLSEISGQILDFLSRYLPTHMLPNVIVPMDEMPQTINGKIDYRALLARLPEHLSGLQHPSHQPQEENASYSPQTALESHLRDIWCEVLRQQQIGRDQSFFALGGHSLHALRIAARIEQQLAVRLSLAELLQHQTIKQLAHFLDSRMTGKVIEKNTQYNTIKRVVRGRK

SEQ ID NO: 6109 - protein, 76 aa, Xenorhabdus sp.
MRVEILFDKRANVSESVMSALESELKKKILPQYPDTNFRIALSSNTSVKVTGSKNSSDHDQIMELIQSVWEDDSWL

SEQ ID NO: 6110 - protein, 60 aa, Xenorhabdus sp.
MESLVAQRINFIARMATSCECNQAEDKELALVWIAELSAPYEKSLSGYNNFLKNKSLDNE

SEQ ID NO: 6111 - protein, 67 aa, Xenorhabdus sp.
MQIIAQQNETVDALCWRHYGRTLGMTERVLQANPGLADFGATLPHGTKVEMPDFVPVASKPMIQLWD

SEQ ID NO: 6112 - protein, 87 aa, Xenorhabdus sp.
MDKYSHATYACASTTAIFSGLSLYELSFLLGVLASISLGILTYRLNRREQMKRTLILKDILENLEVEPASKSARIVSELIHNAPKEL

SEQ ID NO: 6113 - protein, 152 aa, Xenorhabdus sp.
QFLDEKEGNRLVAYQDAGGIWTICRGVTRINGKAVYKGMQLTSEQCEALNRVEADKAIDWVKKNVHVPLTEPQIAGIASFCPYNIGPSKCFSSTFYRKLNAGDKKGACQEIKRWIYDGGRDCRATKGQPNGCYGQVFRREQESELVCWGLEE

SEQ ID NO: 6114 - protein, 686 aa, Xenorhabdus sp.
MSKTTKIYASMAKSGLCVPLMSASMLTIAISTNAVAHTEESTRKSASTGDTLVVIAGNSSEQDSGKVSRNEIKVKQAQSVGEVLKNVPGVQAGHPSALGQRFKIRGMDDQFINVTIDGARQEGYHFHHAGSYGIDPEMLKQIDINVGTNSITYDTGALVGSLKFETVDAGDLLEPGRLFGAKGKLSYVSNGSEFQKSLAAYGRIGAVDLLGYFNHRNMSDAKTGRDKAGQESIPTDGKLINYLLKAKFNLTDEQYINVSKEHYQNDADTNFRLNFGPDVNKGRKGKYALERDAYNIAYRYVPVGNDLIDLKISAYHTEQNFNHMKEVGGPGKGFDTITETQGIRARNVSSFDTYQLAHAFTYGYEYFDTRMAYTEAARNTYNKVVETGKSSSVYLEDDIQFADFHFIPGVRWDHYKYNTINKKNEPFERTYAHFSKALGLKYELGASTTLFANYTELFRGPLGKEIGMGPSNHNANLKATTGYNLETGVGGIYPSVFAENDSFTVTGKVFQTNFKNLATTLAKSSLNNIPKSRLEGFELATKYKLDNWSLRATYAKANNKIVQGSALFDSRLEFTPSIGDSFTVGGSYLFDKTDIELGWNSRFVRSTNANGTDNGKVVNIHKAGFGVSDMHISWAPTSGVFKNAELLFGIDNIFDKRYNEQSYYLNTYKGQEEKGRAYKATVSYKF

SEQ ID NO: 6115 - protein, 592 aa, Xenorhabdus sp.
VHRINKTTKKNKTTKKVLIANRGEIAVRIIRACRDYGIQTIAVYADTDVNALHVQLADEAYSLAGNSPAETYLNIPRLLDIAKQAQATMVHPGYGFLSERAEFARAVIEAGLIWIGPESDTIDELGNKVKARQIAQKVGAPLVMGTAEPVKNAQEVITFAEKHGLPIAIKAAFGGGGRGLKVAWRHDEVEELYHSAVREATAAFGRGECFIEQFLDKPRHIEAQIIADKHGNVVVLGTRDCSLQRRNQKLVEEAPAPFLTQQQRERIHQSAKAICAEANYVGAGTVEFLLSVDGTLSFLEVNTRLQVEHPVTEETTGIDLVIEQLRIAEGYPLSIQETPISRGHSFEFRINAEDAGKGFLPASGALTEFIPPSGPGIRLDSGVINGSVIPTTFDSLMAKLIVTGATREQALVRARRALREFKISGVASVLPFHQAVIEHPDFVSEDTFNVHTRWIETEFANQLAALLRQDLAESKGIIRTFIEIDGRRHEMGLPADLLAGLTPLVPAGEPQSSSPVVQQIPEDPHQVKTPISGILHSWLVQEGEQVNEGDVIAIMEAMKMEVQINAHRSGKITFRAQEGDYQDAESILANIE

SEQ ID NO: 6116 - protein, 530 aa, Xenorhabdus sp.
MVELSDLPETLALFDSLNAESISGIEEIIPAARTVMIRFHPLMISAQQLVAEIQRRDLQKSSHIQGKQIEIPMRYNGEDLEEVAEILGISVQDVIQQHADNEYIVAFTGFAPGFAYMISETIAWNIPRRKTPRTRIPVGSVALAGEFSGIYPQASPGGWQLIGTTSERIWDLSRIEPALLQPGYRIRFRNVEHSTVTVSLPATPVVDSLVPVDSASILEIQSAGLQALFQDLGRLGKSGLGISASGAMDKSALRSANRIVGNPSDKACLEITQGGLHAIARGQTVISVTGALCPIQIKTPQGKRLNVSAYQPIDLNDGDEIILGVPHEGMRSYLAARGGFIVPEVLSSCSFDTLSNIGPAPLKAGDNLAIGETSHCPAVSVLETPEFVMPNKDEIVVLDIFFGPRTDWFTQESIELLRNQIWQVTPQSNRIGLRLKGDCPLSRIKDEELPSERTCFGAIQIPTSGQPVLFLADHPVTGGYPVSWLSVELAIILILLARFRSMPNLDLIPSISFMTFRGVKSCNEYHCAPH

SEQ ID NO: 6117 - protein, 254 aa, Xenorhabdus sp.
MKTIDLNSDLGESFGQWKMGNDEAILGIVSSANVACGFHAGDPAGILKTLKLARENQVIIGAHVSYPDLVGFGRRNMDLASHELTADVIYQIGALQGLAASIGTAVNYVKPHGALYNTIANDERQALAVIDGILAVDSGLALVGLAGSNILRLAQEKGLRTIAEAFADRAYTAKGELVSRREAGSVLHDAALVAQRMLQLVTEGGVESIDGKFTPIQADSICVHGDSFGALEMAKQVKAILQQAGITVRSFIHS

SEQ ID NO: 6118 - protein, 585 aa, Xenorhabdus sp.
MAFTLRPYQQEAVDATIRHFRQHKEPAVIVLPTGAGKSLVIAELAKLAHGRVLVLAHVKELVAQNHSKYCSYNLTADIFSAGLHQKQSERKVVFGSIQSIARNLDRFNHQFSLLIIDECHRISDDENSQYQQIIQQLQKNNPRLRILGLTATPYRLGTGWIYQYHYHGMIRGDENCFFRDCIYELPLRYMIKHHFLVPPERLDMPVMQYDFSQVRTSQQGIFNTAELNREIKRQKRITPHIVRQIIKYAEDRKGVMIFAATVEHAKEISLLLPAEQAALVSADTPGHERDLLINAFKKQQLRYMVNVAVLTTGFDAPHVDLIAILRPTESVSLYQQIVGRGLRLFPDKKECLILDYAGNPHDLYTPEVGSHKPDSQNQPVQVFCPLCQFANTFWGKCTAEGDIIEHFGRRCQGWEEDENGKRHQCDFRFRFKSCPHCGTENDIAARRCHHCQEVLVDPDDMLKAALKLKDALVLRCGGMQLTPGNDNKGEWLKITYYDEDGANVSELFRLTTPAQKKVFELQFIRHHQRAPGIPFVWKTAGDIAQQLPLLRHPDFVVARKKGQFWQIREKIFDYQGRFRRADDLY

SEQ ID NO: 6119 - protein, 94 aa, Xenorhabdus sp.
MMLTINAEVRKEQGKGASRRLRRANKFPAIIYGGNQEPVSIELDHDAVINHESKPEFYEILTLVVDGKETKVKVQAVQRHPFKPKLTHIDFLRA

SEQ ID NO: 6120 - protein, 75 aa, Xenorhabdus sp.
MPQSSRYSDEKVEHLLAELVSVFEKNHVPTDLSLMVLGNMVTNLINTSIAPAQRKHIANSFAHALQSSINEDKAH

SEQ ID NO: 6121 - protein, 580 aa, Xenorhabdus sp.
MVTNRQHYREKVSQMISWGHWFALFNIVFSLVLGSRYLFASDWPGSLFGRIYALVSWLGHFSFIVFAAYLLVLFPLTFIVMSQRLLRFLSAALATAGLTLLIFDSSIYVRFHLHLTPLVWDLVTNPEQGERAREWQLMFICIPLIFLVQMLYGTWSWQKLRSLNRQKLGKPVAAIFITAFVASHMMYIWADANFYRPITMQRSNLPLSYPMTARKFLEKHGLLDKNEYQRRISQQGNPAALTIEYPLNNLSYRDSGRGYNLLLLVVDSLDNGDITANKMPFLERFTKSNIQFTQHFSTGMKNDTALFGLFYGISSSYLDSILNSRKPSALIDALTHQKYQFGLYSSDGFQTPLYRQAILTDYSLPYEANPNDNLTVEQWQQWLNSRNNTTPWFSFLNLNGISPSSIQVDKKTLDTEINHVLDTLKNKDILDNTIVVITAKHGSTITNSDPRWFIGDKFNRKQMHVPLIIHWPGTPAQVINKLTGHQDVMTTLMQRLLHVSNSPDDYSQGEDLFRGQRNIPWLITGENGSLIVTTTENTIYLSKDGDYHLYDSDDNEIQNAKPNLTQLLQILTEIKRFLAN

SEQ ID NO: 6122 - protein, 41 aa, Xenorhabdus sp.
MKPIVYLDESGFSQSMPRTQGYSAKGLRWLRHTRLAGQRPH

SEQ ID NO: 6123 - protein, 73 aa, Xenorhabdus sp.
VNNIQLSVVHRLPQSYRWSSGFVGTRVEILPEEEADIGNTLMGLKLLSHEGEHAWSILHDIHQSISDMQIISL

SEQ ID NO: 6124 - protein, 235 aa, Xenorhabdus sp.
MRLDKFLSQQLGISRNDVGRELRAGRVTVNNEIIKTGAYKLKPEQTVAYEGTVLEQLDGPRYFMLNKPQGYVCSTDDPANPTILYFIDEPVAHKLHSAGRLDIDTTGLVLLTDDGQWSHRITSPKHHCEKTYLVTLENPISGDTEEKFLSGILLNGEKTLTKPAKLEIIEPQLVRLTISEGRYHQVKRMFAAVGNHVVELHRERIGDIYLDPDLEPGEYRMLTENEIKSINMPTA

SEQ ID NO: 6125 - protein, 335 aa, Xenorhabdus sp.
MSLEITQIALHQLIKRDEQTLEVILRDSLLDTNQVVEEMMAELHRVYSAKSKAYGVFSDKSELAESLRHQRKGNEDFLGFSRAATVRLKDELIKYPFAEGGTVLFCQYRYLAVEYLLIAVLNSCSSTSVDEALDVNTTQYLDIPHADIVARIDLTEWETNPESCRYLTFLKGRVGRKVSDFFMDFLAASEGMNAKVQNKGLLQAVDDYCESAQLDKNERQAYRQQVYSYCNEQLQAGEEIKLQELSQELPPLGEQSFQQFSQDQNYDLEESFPADRSTLRQLTKFAGSGGGLTINFDAMLLGERIFWDPATDTLTIKGTPPNLRDQLQRRGSNNH

SEQ ID NO: 6126 - protein, 112 aa, Xenorhabdus sp.
EQSKGKTIVADKNGYPIAVEQPPTPAHQWNGDEWVADEAEAKQWYIRQATEYKQTLMNESRDRIAPLQDAVDLDMATKEEKAALLVWKKYRVLLNRVDCSTAPDIVWPEQPE

SEQ ID NO: 6127 - protein, 258 aa, Xenorhabdus sp.
MFLVDSHCHLDCLDYETLHKSVDDVVAKAAERDVKYMLAVATTLPGFLQMKNLIGKRNNVAYSCGIHPLNLDEGYDFDELARLAADSDVIAMGETGLDYYYQKDNAELQRTSFRQHIRIGRELNKPVIVHTRDAKDDTLMVLREEKVQDCGGVLHCFTEDKETARDLLDLGFYISFSGIVTFRNAEQIREAARFVPLDRILVETDSPYLAPVPHRGKQNQPAYVRDVAEYMAVLKGVSLEELAEVTTRNFCDLFHIDI

SEQ ID NO: 6128 - protein, 116 aa, Xenorhabdus sp.
MAEETIFSKIIRREIPSDIVYQDELVTAFRDITPQAPTHILIIPNVLIPTVNDVMPEHEAALGRLFTVAAKIAKQEGIAEDGYRLIMNCNRHSGQVVFHIHMHLVGGHPLGPLLAE

SEQ ID NO: 6129 - protein, 145 aa, Xenorhabdus sp.
QKVPQPPKIQSINWNNIVQPLVDQMAKAHGVEAGKILLVDSVKNNTSGSLRTLKATDAITDVVSKIHVFQVVPKNQVYYARQALGLSSEDSLASRSKSIGLARYLNADYVIYSVASGDTQHRKINMQLMLVKTGEILWSGSSDIN

SEQ ID NO: 6130 - protein, 257 aa, Xenorhabdus sp.
TGLTQGSHYITDGVRQMVGRKHTGHSGALGVNRQREQRILRKLSLTGIAPDVIAMHDDWLLLEWLKGTKITAEEFGLPTFQQSLANTIAILHNQTPLGYAFQLKQQLASQWQDIDNLRLSPDWLRLHKFFISAKMPVPLKIAPAHMDIHPDNLIMTSEGLKLIDWEYAADVDIGFSLAGLFEGNQWNEMQQKFFLNYYCTDASGYSDIVLLQQKIRQWKPWVRYMMLMWYEVRWQQTKDPQFLALAYPLRLGFKLTF

SEQ ID NO: 6131 - protein, 339 aa, Xenorhabdus sp.
MGPVMLDVVGHELDSEEREILQHPLVGGLILFTRNFHDTQQLRDLVRQIREASRHRLVIAVDQEGGRVQRFHEGFTRLPAAQSFACLHDELMGGHLAEESGWLMASEMISMDIDISFAPVLDLGHKCTAIGERSFHEEPESAMVMAERFIRGMHSAGMKSTGKHFPGHGAVIADSHKETPVDNRPMDAISCHDMLIFRDFIQRNLLDAIMPAHVIYSQIDDRPASASPYWLKNVLRQQLGFNGVIFSDDLSMEGAAVMGGYADRAKASLEAGCDMILVCNNRQGATNVLDNLPIVNSDKVARLYHQGRSFSLEELKKSERWQRANLQLNNLCEHWLSCG

SEQ ID NO: 6132 - protein, 434 aa, Xenorhabdus sp.
MTTPKTRIVIIGGGAGGLELATRLGHKLGRKQKAEITLVDRNNSHLWKPLLHEVATGSLDDGVDALSYLAHASNHYFNFQLGTLTNINREEKKITLAAIRDESSDLLVPERELTYDILVMALGSQSNDFGTAGVRENCIFLDNPQQAHRFHNEMLNLFLKYSANQCPEEKVNIAIVGGGATGVELSAELYNAVKQLNSYGFESLNTDALNVTLVEAGERILPALPPRISGAAHQELTKLGVKVLTKTMVTSADENGLNTKDGEQIKASLMVWAAGIKAPDFMKEIGGLETNRINQLVVKPTLQTTLDETIFAIGDCASCPKKEGGFVPPRAQSAHQMASRCYDNILALLNEKPLKEYEYKDHGSLVSLSKFSTVGSLMGNLMRGSMMVEGRIARIVYISLYRMHQVALHGYIKTGLMMLVGGINRVIRPRLKLH

SEQ ID NO: 6133 - protein, 148 aa, Xenorhabdus sp.
DPMFQSVSLFIGLRYMRGRAVDKFGRFVSWLSAIGITLGVAALITVLSVMNGFERSLEASILGFMPHVIITSENGSINPAEHPKSQLSGLKDVTRIEPVVQGDVVLQSAHNVGVGVMLGIKPDEYTPLAEYTVNVDQSQLQPGRYFVI

SEQ ID NO: 6134 - protein, 107 aa, Xenorhabdus sp.
MIVSLIERLYKFGWKLDVRSVFSAPVLMIMAQAIEGDADTFVVPPNLIPDDCTAITPDMLPLVSLSQAEIDAIVEVTPGGASNIQDMYPLAPLQEGVLFHHIYTGTG

SEQ ID NO: 6135 - protein, 2035 aa, Xenorhabdus sp.
QQVVWLDQILRPDNTCYNIGSVILIEGELDEALLIQAFKNVVERHDALRLRLIDTQELPLQKIDNTLPVSVTVNDFSGHDNPEELAEQHFHTTFLRPFDLNNELFRFELFRLGNKRWNWQFFCHHLIGDGTTLGLITEEIANTYSQLARGEAITESASSYIDFVDEDIAYLDSKRYIQDLQFWLERYENFPSALLKPSNSDKATEHQPPEPLVYQFDRTLFQRIEELVAANGLSVLHFMYAILACYFFRTTHFSRTDSSEEIVFGIPVHNRKNIKQKRMVGMFTSVIPVGISVDPHDSFLDVMRKVATELRRCYKRQRLPIAELNRHLQTRQKTGQNQLFDIILSYEKIEMSASLPEASLTCVKMQRGNPFPLIVAIHHYAFTTNSEDIRKPVTLEFNYSPDYLSHTEVTALQSRLITLIEAAISAPETLTRYLPVLSPTEQQKILVDFNATQKSFTQHVLIHQLFETQAELSPDNIAVEFNGQKLSYDELNRRANRLAHYLIARGVRPDKRVAICIERSLEMVVGLLAILKAGGAYVPLDPAYPTERLAYMLEDSEPVIILTRTTLADKLTSSVPIILLDNILDTDPSFLAEQPADNPDAQALGLMPHHLAYIIYTSGSTGLPKGVMVEHTNITRLLAATHSRFRFDNNDVWTLFHSFAFDFSVWELWGALAYGGKLIVVPLECARSPQMFYELLCRKQVTILNQTPSAFRQLIAAQEMMPHEQHTLRCIIFGGEALELHTLAPWVERNPTEQTRLVNMYGITEITVHATYRELTEAEIHARHGSLIGQPLEDLRIYILDAYVQPVPIGVAGELYISGAGVARGYLNRPDLTTERFLPDPFAGNPDERMYKTGDVGRWLPDGNIEYLGRNDFQYKIRGFRIELGEIEARLKQCHGVREAVVILREDEPENKRLIAYLLPQNGVELVPAVLRRQLAEHLTEYMLPSAFVVLAAFPLTPNGKLDRRALPLPEHSAVVTHEYETPQGRIETALAQIWQNLLGLEQVGRHDHFFELGGDSLLAVQLAARIRRIMGRELPLQQIFSRPVLMELAQVITEAAVSTQAIIPSADRSQPLPLSFAQQRLWFLNQLDSAASRAYHIPVALRLAGLLNYHTLTSTLNYLVARHESLRTRFILVEGQPYQHIDPADTGFTLSCHELRNLDPARQAVRIEEITALEAQTTFDFIHGPLVRGHLLQLTDEEHLLLITLHHIITDGWSIGVFMRELDIIYHALLNGHDISLSPLSIQYADYAVWQREWLQENIFTAQQNFWRIQLEHAPALLSLPTDRPRPAIQSYIGSQVPFQLDNTVLASLQALGKRHDTTLFMTLLAGWSIVLSRLSGQDDVVIGTPIANRSLSELEGLMGFFVNTLALRIRLNNHFSVTDLLAQVREQALAAYAHQDLPFEQVVEALQPERSLSYSPIFQVMLALDNTPVQDQTSHELQITRLEQAGHSAHFDLMLILADSDTGLTGGLEYAADLFDAATAERMVGYLINVLTAMAEDETQAITHLPMLSAAERQQLLVDFNATQDTFSEINSPQPALIHELFEQQVTQTPDAIAVVFEQQTLSYDALNRHANQLAHYLVKLGIKPDDRIAICIERSPEMIVGLLAILKAGGAYVPFDPAYPAERLAYMLEDSAPTAILTQTTLAGTLHSSVPIVLLDNIFDISSSPLAELPDHNLDAQSLELTSRHLAYVIYTSGSTGLPKGVAIEHSNTVNFLNWARKTFSQQELAHPLFSTSLNFDLSVYECFTPLLSGGTVHLVPDVLSLINTRSIAAKQNLSLINTVPSAIPQLIEANAIPANIATINLGGEALKPHIVKQLFAHTNIRHIYDLYGPSETTVYSTWTRMERTTGFHNHIGRPIANTRIYILDSSAQLVPIGTVGEIHIAGAGVARGYLNRPELTMERFPADPFSSEPNARMYKTGDLGRWLPDGNIEYLGRNDFQVKIRGFRIELGEIEAQLMQCHGVSEAVVIAREDTFNQQAIEEKTGEQKRLIAYLRPQEGVELSPAELRQQLAQHLAEIYIAQCFICVGNLPVNP

SEQ ID NO: 6136 - protein, 419 aa, Xenorhabdus sp.
YRYWRVHLLLSILIGYATFQLTRRSLNVVMPAMQIELVLDKNDIGWIASLFYLAYGVSKFISGIFHDHTGYRWFMGVGLLITGVLNVVLAFCSSLSAILIIWTLNGFFQGWGWPPCARLLTYWYSRNERGFWWGCWNISINISGILLTLLSTLLATLYSWKAALLLPGVISILLGIWLCQQLRGTPQEHGLPSIGSWRQDHLELRQEQLSPPMPMIKILKETIVFNRIIWLLGISYILIYFIRTAIHDWGSLWLTEKHGSDLLNTNTILSLFELGGLLGALCSGWGSDLLFRSQRAPMILLFSLGLFFSVTALWLVPIQNSALLATCIFSIGFFVFGPQMLIGLAATEYCHKNAAGTVTGYLGLYSYLSAAIAGWPLSQVINHYDWSGMFALITLASALMGLLLMPLLISNSSKFNNPS

SEQ ID NO: 6137 - protein, 520 aa, Xenorhabdus sp.
TKKQNGSRFLRTVEWLGNALPHPVILFIILIAILLVSSAIGQYFDITVIDPRPEGAKGRAADGVIHIVSLLDADGIRKILSNLVTNFTGFAPLGTVLVAMLGVGIAERSGMLSALMRLVVVKAPPKLTTLAIVFAGIMSNTASELGYVVLIPLAAIIFHSLGRHPLAGLAAAFAGVSGGYSANLLLGTVDPLLSGITQQAAQIIDPSYTVGAEANWYFMFASTFLISILGYLVTEKIVEPQLGPYTNTLNEDESTFKSSAEITPQEKKALIAASLTFAALSVILALNVIPENSILRNQDTGLIGNSPFLKSIVVFIFIFFAVPGIVYGYVARTIKSNKDVVDGMAQSMSNLGLYLVIIFFASQFVAFFGWTNIGQIIAVKGATFLNEINLHGGLLFIFFILICAFINLMIGSASAQWAVTAPIFVPMLMLAGYAPETIQAAYRIGDSVTNIITPMMSYFGLIMAITVRYKKDAGIGTMITMMLPYSVVFTVGWSLFFYLWVFVLGLPVGPGSPIYYTPAG

SEQ ID NO: 6138 - protein, 272 aa, Xenorhabdus sp.
MNTLIEFITEPFMHDFMQRAIVAAIVVGTVCAVLSCYLVLKGWSLMGDAISHAVLPGIVLAFVAGIPLAIGAFLSGIFCAFATGYLKEHSRVKEDTIMGVVFSGMFAFGLVLFTRIDTEQHLTHILFGSILGITQNELIQIMCIAGFTLAVVLLKRKDFMLYCFDPNQAKVVGLPVKLLHYGLLSLLALTIVASLQAVGIILVIAMLISPGIIAFILCRNFERMMIVAIIASVTSSVLGTIVSFHIDGETGACIVIIQAIFFAFAVIYDQIK

SEQ ID NO: 6139 - protein, 286 aa, Xenorhabdus sp.
MWQTVSRLLSEHFEEAEIRNKTELSGGDIHRSWSIEYGDQHIFVKSNTKEMLPIFKTEAEQLELLARSNTTKVPEVYGVGHDRNHSFLLLEYLPIKPFDAHNAYCFGQQLARLHQWNEQPKFGFDFDNMLGTTIQPNGWQKRWNQFYAEKRIGWQLQLASDNGMVFGNIDAIVEKISNKLHSHQPEPSLLHGDLWPTNCASLNHNCVVAFDPACYWGDRECDLAMLPFYPELPLQVLDGYQSVWPLPSDFIERQPLYQLYYLLNRCNLFGGDNFITAQSIIDNILS

SEQ ID NO: 6140 - protein, 151 aa, Xenorhabdus sp.
IMTAEGHLLFSVASLVLAHQLEITPEIAQGDWFHMIPGVLLASLLPDIDHPHSTLGRLFRFISVPIARLCGHRGFTHSLLALTVGVVLFQTEIPPEWPIPTDFIHAMLIGYISHLIADMLTPAGIPLLWPLKMRFRIPILRGKERKKAERF

SEQ ID NO: 6141 - protein, 237 aa, Xenorhabdus sp.
VEDQHGLISSKEVNAFLGDRFPLCFAAKGEARPLKIGIFQDIVERIQGEECLSKTQLRSALRLYTSSWRYLYGVKEGAQRVDLDGNACGELEAEHIEHARQQLAEAKARVQAQRAEQRAKKRETENVSDKKSERPVNKKDAPRRRPEAGKKDEKRPARSQERPQQSRKPADKTSKKIAQPELTSVTDVSSLKVGQTIKVNVGKSLMDASVLEIAKDGVRVQLPTGLALIVRAEHLKF

SEQ ID NO: 6142 - protein, 666 aa, Xenorhabdus sp.
LVPVAGSTVGNNQLLVTIIQLPDQKREPQHATVSKRVVSRFLSSHYRHFNLDADFSDKIFDRYLNMLDYGHNIFLASDIAQFATQKGLLGKELENGDLHLPYALFNLQQKRRFERYQYALSRLEQPIRLDGNDKLETERNKAPWPTSVEELNNLWDAKIKSDWINLKLSGKSDKEIKETLTKRYRTLLKHLTQSKSEDVFQIIMMAFAREIDPHTSYLSPRNTEQFNSEMSLSLEGIGAVLQYDDEYVTVRSLVAGGPAAKSNLLKVGDKIIGVGLAGKPIVDVVGWRLEDVVALIKGPKGSKVRLEIIPSAKGAKNHIITLTRENIRLEDNAVKMSVKTVGKEKVGVLDIPSFYVGLTNDVKVQLQKLTKQNVSAIVIDLRGNGGGALTEAVSLSGLFITTGPVVQIRDNTGRIKEDSDTDEAIYYKGPLVVLVDNLSASASEIFAAAMQDYGRGLIVGEPTFGKGTVQQYRSLNRIYDQMLSPDWPAIGSVQYTIQKFYRINGGSTQLKGVTPDILMPTGAEPTDIGESKEDNALPWDSIQPAIYSSSKNISELVPSLTKLHRQRIANDPEFKYIDQDIAYYKVLKARNGVYSLNYAEREKENKEYEAIKLNRINERFKREGKKPLVSLDDLAKDYKGPDPYLDESVQIALDLAHQPVEITQNK

SEQ ID NO: 6143 - protein, 294 aa, Xenorhabdus sp.
MMRIALFLLTNLAVMVVFGIILSLTGVQRSSVAGLMIMAGLFGFGGAFISLLMSKWMALRSVGGQVIEKPSNEMEFWLMETVRRQSDQVGITMPQVAIYDAPDINAFATGARRNASLVAVSTGLLNNMSRDEAEAVIAHEVSHIANGDMVTMTLLQGIVNTFVIFISRIIAQAAASFLSSSDDESESSSNGNPIVYMILSMVLEIVFGILASIITMWFSRYREFHADAGSAKLVGREKMIAALQRLKTSYEPQEEGSMMAFCINGKSKSFSELFLSHPPLDKRIEALRSGEYIK

SEQ ID NO: 6144 - protein, 179 aa, Xenorhabdus sp.
MTYSQARYVAITKRLLGWIIFIPAFLSTLVSVVNLVWLHGVKGDGINAVLNDFLKMMADVIKFNTPFLDFFWRHSPTPDYVVALTGANASFLVIYFLMFVGLAMSASGLRIYRQFKFIREQIEDHVILEKAKESDVTKEQLEAKVEFPRHSLFSQIFTLYISPIIIGAIAYFLSKLLGW

SEQ ID NO: 6145 - protein, 95 aa, Xenorhabdus sp.
VYVLEGTPDVWINGELYRLEPGDTVGFPAGTGICHTVINNTGSEVRLLVVGEKSKPENKIWYPLNQEYQKTRSDGWDSPPEQVFGNHNGQPDKNR

SEQ ID NO: 6146 - protein, 455 aa, Xenorhabdus sp.
MNLLLIINVLVFTALLVILAKTSSDQWSLSKKVLIALVVGVFFGLVLNVIYGAHNPIVKESIKWFNIVGNGYVQLLQMVIMPLVFASILSAVARLHKASSLGKISLLTIGTLLFTTAISALISVVIANMFGLTAAGLVQGTQETARLSAIETNYINRVSDLSVPQLILSFIPKNPFADLTGANPTSIISVVIFATFLGIAALQMLKDDHERGERALIAIDTMQAWAMKLVRLVMRLTPYGVMALMTKVVASSNIHDIAQLGNFVVASYIAIGLMFVVHGILLAITGINPLKFLKKAGPALTFAFTSRSSAASIPLNVETQTRRIGVPESIASFSASFGATIGQNGCAGIYPAMLAAMIAPTVGIDPFDPLWIATLVGIVTISSAGVAGVGGGATFAALIVLPAMGLPVTLVALLISVEPLIDMGRTALNVNGAMTAGTITSQLMGKTDKKLFDQD

SEQ ID NO: 6147 - protein, 290 aa, Xenorhabdus sp.
MELLLQPFNYNYMVKAMWVSAIVGAVCAFLSAYLMLKGWSLMGDALSHSVVPGVAGAYALGLPYAGGAFFTGMLAALSMTLVRHITRLREDAVIGFIFSTFFAAGLLIVSLNPTSVNVQTIILGNILGIADEDVLQVEIIIAVSFIVLMLLWKDLLVVFFDENHARSIGLSPLRLKIIFFTLLSACTVAALQTVGAILVIAMVVTPGATAYLLTDRFKNLLIISVAIGALTSCIGAYISYFLNGATGGVIVTLQTLIFLLAFFFAPKHGMLAYRQRAKKESQAITQGEHS

SEQ ID NO: 6148 - protein, 293 aa, Xenorhabdus sp.
LFEKPHLLVDNATVTYNNGHTAIYDASFDITGGTICALVGMNGSGKSTLFKTIMGLVTPSQGKVTLNEQSIKTALKKNIIAYVPQTEDVDWNFPVLVSDVVMMGRYGKMGFLRRPSKLDHQIVNRSLERVGLIELRDRQIGELSGGQKKRAFLARALAQEGKVLLLDEPFTGVDVKTENAIIDLLRDLRDEGHLILVSTHNLGSVPEFCDHVILINRTVLASGPTETTFTQKNLETTFGGVLRHINLSGPELHDDDDPRSLTVITDDERAAVFYGHDNHVPPRQSQKQKDEQL

SEQ ID NO: 6149 - protein, 272 aa, Xenorhabdus sp.
KKFRVVTTFTIIQDMAQNVAGDAAIVESITKPGAEIHDYQPTPKDIIKAKRADLILWNGLNLERWFERFFENMQDIPVAVITEGITPLPIREGPYNQNPNPHAWMSPNNALIYIENIRKALVTNDPQNADTYNRNAKIYADKIAKLDAPLRERLSRIPENERWLVTSEGAFSYLTQDYGFKEVYLWPINAEAQGTPQQVRRVIDTMIEHKIPVVFSESTVSDKPAKQVSKETKARYGGVLYVDSLSTVKGPVPTYIDLLNMTVDTIAKGFNQ

SEQ ID NO: 6150 - protein, 261 aa, Xenorhabdus sp.
IYAFSCVFIWSFIPSISRFGQKEMDHFQFLFWSNVLSVLAVFLVAVMMGRNWKDLIFVPFPVMIKVFILGALDCFFYLLLYYGYSIENGVAVLVIQYSWPLMIIGLSFFLFKEKLSIKQMIGMAIGFIAVVITFTQGNITEISVQHPQALLLVFSGAFCFALPSVLSKQFAIDPYISTFWVFVNSTVVSLIFLLAFSKFNWPMGDSLMPTVLNGIILNGISYIIWFKAMSSPDSPKIASILFLSPILSMMWLILFFGDEFV

SEQ ID NO: 6151 - protein, 125 aa, Xenorhabdus sp.
NLVEIFIDVDDFCRFFIPQWEQFCLNKGYRLRRRKGHMYPSEIMTILILFHLSHYRDFKNFYLEHIWRYHHHDFPTLLSYTRFISVTPSVLVPLCSYLTQLKGNPTGIAFIDSTRLSVCHNIRIP

SEQ ID NO: 6152 - protein, 454 aa, Xenorhabdus sp.
MNNIYEPLMLKLADQIGAHKKFLVGFSGGLDSTVLLHLLARLRQQASQSCIDKHNAFTLRAIHIHHGLNAKADEWVAHCRQICADWQVDLCIEKVSLDSRKKGIEAAARDARYQAFKHELRQGEILLTAQHLDDQAETFLLALKRGSGPAGLSSMPAVMPFAETTLIRPLLNISRAELELYAQEHSLKWVEDDSNQDDRYDRNFLRLNIMPLLNRRWSHFSQAVSRSADLCGEQEQLLDELLEESLNALITPEGSMSILPLETFSEAKRNALLRRWLSRYGVRMPSREQLQRIWSEVALSRQDAEPQFRLGKLDIRRYRQQLWLVPQYQSLSGVVIRWDIKQELRLPDGLGVLFLSEDKEAAVNIRSPRNDERVTIRFGIQANISIVGRQHSRHSKKLWQEFGIAPWLRERTPLLYYDDKLIAALNVFVTKEGQCLADDRQFSVLWQKTVSATQ

SEQ ID NO: 6153 - protein, 319 aa, Xenorhabdus sp.
MSLNFLDFEQPIAELEAKIDSLTAVSRQDEKLDINLDEEVQRLREKSVELTRKIFSDLGVWQVSQLARHPLRPYTLDYIQRIFTDFEELAGDRAYADDKAIVGGLARIEGRPVMVIGHQKGRETKEKIRRNFGMPSPEGYRKALRLMEMAERFKLPIITFIDTPGAYPGVGAEERGQSEAIARNLREMSRLSVPVICTVIGEGGSGGALALSVGDKVNMLQYSTFSTISPEGCASILWKSAEKAPLAAEAMGNTAPRLKELNLIDTVIPEPLGGAHRNYDMMAESLKTQLLADLAELSELNSEELVNRRYERLMQYGYC

SEQ ID NO: 6154 - protein, 1160 aa, Xenorhabdus sp.
MTEPRFVHLRVHSDYSMIDGLAKTGSLIKKVAGLGMPAFAITDFTNLCGLVKFYGSAHSSGVKPIIGADFYMESEQLGDEYAHLTVLARNNEGYQNLTLLISEAYQKGYGAVGPTIRQEWLAKHKAGLILLSGGRMGDVGKFLLRGNRVLVDQCLDFYQEHFPDSYYLELIRTGRQDEESYLHAAVELAAEKNLPVVATNDVCFLESGDFDAHEIRVAIHDGYTLSDPKRPKNYSPQQYLRSEQEMCELFSDIPEALANSVEIAKRCNVTIRLGEYFLPKFPTGDMSTEDYLVEKSKQGLEERLEFLYPDPAVRAEKRLEYDERLDIELKVINQMGFPGYFLIVMEFIQWSKDNGVPVGPGRGSGAGSLVAYALKITDLDPLEFDLLFERFLNPERVSMPDFDIDFCMEKRDQVIDHVADIYGRDAVSQIITFGTMAAKAVIRDVGRVLGHPYGFVDRISKLVPPDPGMTLEKAFVAEPQLPEIYEADEEVKALIDMARKLEGVTRNAGKHAGGVVIAPTKITDFAPIYCDPEGLNPVTQFDKNDVEYAGLVKFDFLGLRTLTIINWALEMVNARRVGKNLEPIDIAAIPLDDQKSFDMLQRSETTAVFQLESRGMKDLIKRLRPDCFEDMIALVALFRPGPLQSGMVDNFIDRKHGREEISYPDVEWQHETLKPVLEPTYGIILYQEQVMQIAQVLAGYTLGGADMLRRAMGKKKPEEMAKQRSVFEEGAISQGVDGELAMKIFDLVEKFAGYGFNKSHSAAYALVSYQTLWLKAHYPAEFMAAVMTADMDNTEKVVGLVDECWRMGLKVLPPDINSGLYHFHVNDEGEIVYGIGAIKGVGEGPIEAIIEARQKGGHFKELFDLCARVDTKKLNRRVMEKLIMSGSFDRLGPHRAALMSSLEDALKAADQHAKAEATGQADMFGVLAEEPEQIERSYASTPKWPDQVVLDGERETLGLYLTGHPITGYLKEIERYTNGSRLKDVNPTPRGQVTTVVGLVLASKIVTTKRGNRIGICTLDDRSGRLEIMLFSDALERYQHLLEQDKILIATGQVSFDDFSGGLPMTARELMDISEAREKFARGLAISLSDRQIDEQLLNRLRSALEPHRSGTIPVHLYYQRVDARARLRFGATWRVTPTDTLLTDLRTLLGSEQVELEFD

SEQ ID NO: 6155 - protein, 196 aa, Xenorhabdus sp.
MNFVYPQANLIAGVDEVGRGPLVGAVVTAAVILDPARPITGLMDSKKLTEKRREALYLEITEKALCWSLGRAEPEEIDRINILHATMLAMQRAVEGLAIQPDYVLIDGNRCPVLSMSAQAVVKGDSLVAEISAASILAKVTRDREMAELDKHFPEYGFAKHKGYPTALHLEKLSLLGATEHHRKSFAPVKRALAIG

SEQ ID NO: 6156 - protein, 245 aa, Xenorhabdus sp.
KADLVLAFLPLEKAFYDRFNVPCQFIGHTMADAMPLQTDKIAARKGLDIPENAHCLAILPGSRHAEVEMLSADFLRTVQLLRNELPDLHVLVPLVNAKRREQFQRIKNEVAPDLSIHLLDGQARAAMIASDATLLASGTAALECMLAKCPMVVGYRMKPFTFWLAKRLVKTPYVSLPNLLAGKELVKELLQDECEPQALSAALLPLLRGGVEVEALKETFLHLHESIRCDADEQAAQAVLELARK

SEQ ID NO: 6157 - protein, 218 aa, Xenorhabdus sp.
  unsure (1)..(218): unsure at all Xaa locations
WDVVEIPEDMKAKAEEYREKLIETVVEIDEEAMEAYLEGNYPDNDKIRELVRRGTIDVKFHPMFCGTAFKNKGVQPLLDAVVDYLPSPLDIPAIKGIDAKTEAEIERHADDSEPLSMLAFKIMNDPFVGSLTFARIYSGKLEKGTSVMNTVKDKRERVGRMLQMHSNSREDIEEAYAGDIVALAGLKETTTGDTLCDPLKPVILERMEFPEPGIQIXX

SEQ ID NO: 6158 - protein, 57 aa, Xenorhabdus sp.
VLKRPSEYWGFSPYNPNPFEKPEKDSLEFGKAAHMLLLGEEGFKERYVLRPEKYPDE

SEQ ID NO: 6159 - protein, 132 aa, Xenorhabdus sp.
ALKFTGRGFMVWGARTCTEVNNISWRYIPVRRLFNAVERDIRQALRAVLFETNNQPTWMRAKAAVDHYLYALWQKNALMGNTPEEAYFVHIGQDITMSDADIKQGKMIMKVGLAPVRPAEFIVLQFTQDIVQ

SEQ ID NO: 6160 - protein, 402 aa, Xenorhabdus sp.
MERIQPGVTLTESIITTGQQEIPSAVPVFIGYTSRNQQHAKTAVRIDNLVEYTRLFGDHHLMAFAVRHYFDNGGQQAFVLPLQGNMPSENITQTEAEALMAALSSKAVQEAISAETQITLILAPDIARLNDNVIDDQQILSNLWSEVWMVLLQLSQTRSNLFVLLDAPDEIEQAKQCLKDLSSGYRQWGAAYWPRLETTYQDISGSKNIVLSPTAAIAALIQHTDSEVGVWKAPANIALSQVIRPVKSYLQGSELFNSNGTSLNVIRTFPGKGIRVWGCRTLENTDNTPWRYLQTRRLVSYVIAHLAKLARMYIFEPNNELTWMKCKGQSYNWLRQLWLQGGLYGSREDEAFTVLLGVNETMTEEDIRAGKMIMKVALAVLSPAEFIEISLVFDTQTGALLS

SEQ ID NO: 6161 - protein, 72 aa, Xenorhabdus sp.
MFDRVLRGENIAYADVVIMLLNENSLPLSSWILSNALPVRWQTSDFDANSNAILVNTLELRYQDICWLGVKV

SEQ ID NO: 6162 - protein, 60 aa, Xenorhabdus sp.
MTVEIRELIIQAKVVSSMPPTGSEQQSYSLVQESLDEAALVEKIKREVLAALRDEERWRS

SEQ ID NO: 6163 - protein, 228 aa, Xenorhabdus sp.
MSLIERGLAKLTINAYKDREGKIQAGTIQAMYNPDSLQLDYQTDYQQSLAINSEKQSSIYVQAKPAGLSLELIFDGTMPDNKIPVEAQLMQLKQLCSVDATSYETQFLQIKWGKMRWENRGYFAGRAKSLSVNYTLFDRDATPLRARVILTLVADESLVLQETEQNLKSPAQIALRVQDGVSLAMMAASTASTLSGGVDYLTLASQNNLDNLNGFAPGEILQATRGNP

SEQ ID NO: 6164 - protein, 391 aa, Xenorhabdus sp.
MADTQHSQLFKASNEKTILNTLLSQAGIKARFDQIAALDQKHEQMVQFRCSDWHFLLCRLLATGVWLLPTTEGAQLVQPNTLKSNPTHILKSRGDEEKDILVKDASWQFDNYLNPASLEVSGWDINKQQELSGGRYSSIAVGEAALSPDRSAFLNKTSWDIRYSRPLTTQESGHLAQGLLLNQRISGVTGEFLLKGNGRYQLGDNIQLTGFGSQLDGTASITAVRHHFNRQIDWETTLSIGLQREYLPMLPDATELHIATVAKYQQDKAALNRIPIILPVLNRPNEFLWARLGKPYASHESGFCFYPEPGDEVIVGFFEHDPRYPVILGAMHNPKNKAPLEPSQDNQEKALVVKKELTLKGQTMNAEMNKSLNMSGKNSVEIKGNKINLTQ

SEQ ID NO: 6165 - protein, 140 aa, Xenorhabdus sp.
MENQILTHLYGRGWAFPPAFSLEEGVKMAEGAEDVRQSLHILFKTESGERLMRENYGCGLNDFMFENIRNELFAEIESHIHDSVLRYEARADITEIQVRQSPNNKSTLQVKVMYRLRGSDIHQQIQGTLVLSKGRGMEVS

SEQ ID NO: 6166 - protein, 77 aa, Xenorhabdus sp.
MTPGIGTLTISMLDARQLALQCTSGAALIIKGKKFMAIFTPKFPAINNTVIPPQPDIMTPSLGTGSFITQQNFATVN

SEQ ID NO: 6167 - protein, 726 aa, Xenorhabdus sp.
MELTELNKKLSDLVPMSDFKLDNRTSLQLLQYIEEYTKIIPFNEISAKSSNEENKHWNDFFFMADNTPEKLAELYQGKMEANGKLLPHQTFLLAILRLLETPISLFNALPATHRNLYYRALLGLSPRPAQPDQVALSVELNSTVTEQLLTQGTLFEAGQDEQGNPLQYALDTSLLANRGYISELYWLRKKDKNQWVTSTPWDSQTQSSFPSDGIRLFSETDSDKAVQGGVFITSKLLAMEEGTREITVTFEKNINSQYLVAQISSGNQWLDLTAKGKGTEIILTLSDKEPATSAPEDLDNLVFKEPVLRLQGKNSPPLPTITALKIQGIAEAPFQTYYLTPFGYGLETEPLEEHPTLYLGITGIEPGKNVSLYWKLKAPQQPEDVSWYYLNQKNQWIALDAWVNDETQHLYQDGIWQVALPADASKQATQMPAERCWLKAVVAIPTPKGSWGKNPWLYGLIYNAMTATLVNTNSISSNHFLAPLPAGSIQRPVAPIITVASVNQPWASWNGRVPESYNAFFERGAQHLSHRNRALTWGNMATLLKERYVSIFDVKYPGNDELTRVPALEKQQLTIIPANRYNDSDDPLRPVLNLARLQGMAKWLQQKGSLWAEIEISNPKYVDVKIDYNVIFRPEVNEDFGYRQLRQKLSETYMPWSVDEQRPVMLHNSINYYQLLATIQQQPLVERITSLTLSRSDATKDSDTNTSVEAKDNEVLILVWEAGDKL

SEQ ID NO: 6168 - protein, 953 aa, Xenorhabdus sp.
VKDDIHFDTLLEQAHQVIEQQAGKLWSDTAEHDPGITFLEGFSYGVSDLSYRHTLPLTDLLTPAPNKQQQQGGIFPAEFGPHNTLTCGPITSDDYRKALLDLHSSDWVKEKPESEQDKGDFLFRNVQLVREPEAQRYTYWYDATKREYSFVSSQDAKKFTLRGNYWLYLEPTRRTQENLNSAIQQLTDFLTKNRNIGESVSQIIWTKPADFPLLLEIELDDDVQNVAGIFAAVYSAAEQYLMPEVQRFSTLALKDAGMRNDEIFEGPQLKHGCCPELPIARDYTRKLNLNLSRLVNKLLEIKGVQNVNRLRLDDSFDKTLIEPINKDSWSWSIKKGYYPRLWGQNPLHQLAQHDGPLRVITRGGISVTADENQIRANLPNPSLIQNKPVVLPYGRHRDVGSYYPVSDMLPACYELQQPLSESENIQRQRLISLHQFMLPFEQLLACGCQQIAMLPKLLAFKREGYEVWGDQWPFKPDSASNDAHQNYAPALKELLKQIAHDSDHELDIVNYLLGYFGTQRAPRTFLTDINDFRAMQQGYLAQQPILTYHRANIRIDQVSSLQKRIAARIGLGGELFKPEPDLSKLPFYLVEHRALLPIKPNNQFDKEQKPDSVTEENQANQHYLIIQQAGIKGKLTQGQVINLVIYEGEQNQNQFTIYSQMIAKVGGDQFWLDVGNSTQLEYNLERVMTAAKTKKLFWQNSRVWMEDMSYRLAYASEQSQNGNPLPENQRRLSRTAQTPFPSLITVDNEIILTKKLGADSVTQGYADISEKLYAKIVSFDRIKGTLVIERQDNSTLKFPAPEEAWEYSWHFSGAKYETTDRFSFVISVVVNSELIKISGVDPYKLEAWIKETMLTEFPAHISMIIHWMDQEAFLNFGNTYQRWQNNGAPLGDAAYSILEKLPLGKMPPSLKGIGTMRIATPYQREEVVGKNNDQWNADKIIQNELFYVPKENK

SEQ ID NO: 6169 - protein, 425 aa, Xenorhabdus sp.
MELTMKEIIYSAKIQDQQISSNEKSIGPETDKLKYKFKEGSIPLQIDFSQLIDIADIGRKACGQAPHQNGPGAGLKLGDDGTLNLKMGTFDHRNSAPLALEEDILSVKLGHGLTIKNAGISVGEGHGIKANSESIAVKVADNKGLVVDGNGIAIKPGSGIKLNSDGELEAASADSSITVDSSGIKVKAGRGIKVGDGLEVHLHTDGGIGNSSSGIRVKTGNGIKIDDDRITIDPNTVLPKGMIVMFSGSGIPQGWALCDGTKGTPDLLDRFILGGTLEDIGGKSAKSAAGQKNSKFFIVNSKENETETMDVRVNETKLSLKQIPKHRHIQGGGFTQNTGLRYSAVLNNELNDDFNNKDLSGYRIIYNSTEEPWIRTVNYDHWWPYTSAAGSTEGHSHTASTTLPSHTHQVNTVSPYYILAFIMKL

SEQ ID NO: 6170 - protein, 200 aa, Xenorhabdus sp.
MEPGYTNGFNKKELNQWQYIDSDMSVWGANKLLLNYAENYIDPELRLNKTEAFADFLSEIKQNRISTQSVQRAVQNYLNKLEKLCNISTIAGYLYGNTVTDGKLVFLGQSRLQPDRFYWRAAENIIQDMDGRISLSPAAWGEWQEIQFSTGEIINPKIIWFNHRIHVVYFTKKLEQSTDSTEPSDATSTYQLEVIYQKLL

SEQ ID NO: 6171 - protein, 152 aa, Xenorhabdus sp.
VGLSTLEQKLTAMISAPVEALGYELVGLEFIRARVSTLRVYIDSEEGITVDDCADVSHQVSAVLDVEDPIPGLYNLEISSPGLDRPLFKAEHYQRFMGEEISLMLRMAMQNRRKWQGIIKAVDGEMITVTVDGKDEVFALSNIQKANLVPHF

SEQ ID NO: 6172 - protein, 502 aa, Xenorhabdus sp.
MNKEILAVVEAVSNEKSLPREKIFEALEIALATATKKKYEQEIDVRVCIDRKSGDFDTFRRWVAVEEVTQPTREITLEAAKFDDPEVELGGYIEDQIESVTFDRITTQTAKQVIVQKVREAERAMVVDQFREQQGEIVTGQVKKVNRENITLDLGNNAEAVILREDMLPRENFRPGDRVRGVLYDVRPEARGAQLFITRSRPEMLVELFRIEVPEIGEEIIEIKAAARDPGSRAKIAVKTNDKRIDPVGACVGMRGARVQAVSSELGGERIDIVLWDDNPAQFVINAMAPADVASIVVDEDNCTMDVAVENSNLAQAIGRNGQNVRLAAQLLKKHRGDDKWELNVMTAEELQAKHQAEAHASIDTFTKHLDIDEDFATLLVEEGFSTLEELAYVPVNELLAVEGLDEETVEVLRERAKAALTTLELAQKESLGDQQPAQDLLDLPGMERALAFNLAARGICTLEDLAEQGIDDLSDIEGLNDEQAGELIMAARNICWFGDDA

SEQ ID NO: 6173 - protein, 926 aa, Xenorhabdus sp.
MTEVTVKLLAEEIQTSVERLIQQFTDAGIQKTATDSVSQKEKEALLAHLNREQGGTGGQPGKLTLQRKTRSTLNVPSTGGKSKSVAIEVRKKRTYVNRDAIEQAKAEEQAQREAEEQARREAEEKARLETEAKKLAEEQAQREAEEQAKREAEKQAKREAEEKAKREEAEKAQREAAEKEKVTTKQHTETKSKSVQTEAAAQNEKARREAEAANLKRKAEEEMRRKVEAEAKRVAEEARRMAEENKDKWSNDADVNDNSNSDYHVTTSRHARDAEDENDAKVEGDRRTRSRGGKNTRQKKNNKHSESKADREEARAVGRTKGKQRKPSALQQSFNKPVVAVNRDVVIGETITVAELANKMAVKGSQVIKTMMKMGAMATINQVIDQETAQLVAEEMGHKVILRRENELEEALMSDRDTGETQAEPRAPVVTIMGHVDHGKTSLLDYIRSTKVASGEAGGITQHIGAYHVKTEKGMITFLDTPGHAAFTSMRARGAKATDIVVLVVAADDGVMPQTIEAIQHAKAANVPVVVAVNKIDKPEADPDRVKNELSQYGIIPEEWGGETQFMHVSAKAGLGIDELLEAILLQAEVLELNAVHSGMANGVVIESFLDKGRGPVATILVQSGTLNKGDIVLCGFEYGRIRAMRNELGQEVMTAGPSIPVEILGLSNVPSAGDEATVVRDEKKAREVALYRQGKFREVKLARQQKSKLENMFANMEEGKVSELNIVLKTDVQGTCEAICDSLLKLSTDEVKVKIIGSGVGGITETDATLAAASNAIILGFNVRADASARRIIENESVDLRYYSVIYSLIDEIKQAMSGMLAPEYKQQIMGLAEVRDVFKSPKFGAIAGCMVTEGNIKRNNPIRVLRDNVVIYEGELESLRRFKDDVNEVRNGMECGIGVKNYNDVRVGDMIEVFEVVEVKRSID

SEQ ID NO: 6174 - protein, 136 aa, Xenorhabdus sp.
MAREFSRTQRVAQEMQKEIAIILQREMKDPRIGMATVSGVEVSRDLAYAKVFVTFLNALVDGHDSEKVNLGIKALNEASGFIRSLLGKAMRLRVIPELTFSYDSSLIEGMRMSNLVTNVVKSDEQRRASTDHNEEK

SEQ ID NO: 6175 - protein, 319 aa, Xenorhabdus sp.
MGRRRRGRAIHGVLLLDKPQDISSNDALQKVRRVFNASKAGHTGALDPLATGMLPICLGEATKFSQFLLDSDKRYRVIARLGQRTDTSDSHGKIISERKVQVTSSQLDAALETFRGDTMQVPSMYSALKHQGKPLYEYARQGIEIEREARPITVYELQFIRWEGDELELEIHCSKGTYIRTIIDDLGELLGCGAHVIYLRRLQVANYPNHRMVTLEQLYALKEQAEEQQIEAGELLDPLLLPMDTAVMHFPVIQLSSVVAAYFKQGQPVRSQHSLPSGEWVRVNEGDENKFIGIAVIDDDGLIAPRRLVVETTEDGEMH

SEQ ID NO: 6176 - protein, 95 aa, Xenorhabdus sp.
YIWSYTMSLSTEAKAQIIADFGRGANDSGSSEVQIALLTAQINHLQGHFAEHKKDHHSRRGLLRMVAQRRKLLNYLKRKDLASYTTLIERLGLRR

SEQ ID NO: 6177 - protein, 713 aa, Xenorhabdus sp.
LLNPIVRKFQYGQHTVTIETGMMARQATAAVMVNMDDTAVFVTVVGQKKVKPGQDFFPLAVNYPGRHYPAGRIPGSFFRREGRPGEGETLVARLIDRPLRPLFPEGFLNEVQIIATVVSVNPQVNPDIVAMIGSSAVLALSGIPFNGPIGAARVGYINDQYVLNPTSDELKNSRLDLVVAGTNNAVLMVESEAELLTEEQMLGAVVFGHEQQQIVIDNINALVAEAGKEKWNWSPEPVNQSLHERVAELAESRLGDAYRITEKQDRYAQVDAIKEEVAAIILAEAAEKDLELEESEVLDVLAVLEKNVVRSRVLRGEPRIDGREKDMVRALDVRTGVLPRTHGSSLFTRGETQALVAATLGTERDAQVIDELMGERTDRFLFHYNFPPYSVGETGMVGSPKRREIGHGRLAKRGVLAVMPSINEFPYTVRVVSEITESNGSSSMASVCGASLALMDAGVPIKAAVAGIAMGLVKEGENFVVLSDILGDEDHLGDMDFKVAGSRDGISALQMDIKIEGITREIMQIALNQAKGARLHILSVMEQAIQSPRNDISEFAPRIHTIKINPDKIKDVIGKGGSVIRALTEETGTTIEIEDDGTVKIAATDGDKARHAISRIEEITAEVEVGRIYAGKVTRIVDFGAFVAIGGGKEGLVHISQIADKRVEKVTDYLQLGQEVPVKVLEIDRQGRIRLSMKEAVANTAAEAPQLPESSVE

SEQ ID NO: 6178 - protein, 1162 aa, Xenorhabdus sp.
IFQDELHALQCQEHQLFWKNMFSGLPRTQLPAYRLYDSEPEDRIFTKKTIISKETEEKLTILVQRERVSVKSVFFAAHCLTVAKITAQDEIATGLVTHGRPDAQNSEQTLGLFLNTLPVRFSAQNKTWKECIHAVFSAEQHHAPYRKYPLNAIRQVAGEGAEISSAFNYIHFHVLKDVFDTPDLSLIAFDPWEETNFELLLNVMTDFSTGQHYLRCDFDGRVFSQIQADTYMDIYMSILNRMVSHRDQPATLSQPLTQSNNDIYSQEFISVLAMMAKNVREQPDAIAIRHHDLQWSYRKLWSESGKIASVLIAGGVVQNTPVAIALERSPILVASLIGVMRAGGVCLPLDLSYPAQRIEAMMEQAQPALVIVDDKSSQLFNVTTIPTVRADTLIHRDVPLSETEESETEIVPEQLAYLLFTSGSTGKPKGVAMPHRSLSNVVIWQNETHSGKNICSTLQYAPLSFDVSFQEIFSTLTAGGELHLISEDERRDPLQLLRTLDNYRTERIYLPYVALQQLAETAVALETYPKNLKVVISSGEQLRVTDDIRLLIGQINNGILENQYGPTETHVITAFTMQGDPVVFPALPPIGKNISNADIILLNNQLEEVAIGEQGEIYARGLPVAQGYYRQPELTAERFITLKVSGETLYRTGDLGVKLRDGNILRLGRKDTQVKVRGYRIELAEIELAISSTPGADKVLQDVAVVVQQHGENDSLLVAFLIGEKNEALTGRIQQHLSEKLPKYMVPSRIEWLSTLPKTLSGKRDDAALRSMKVMQCHNNAEDIAPRDNYEQVLCDLAADLLKIPAVSVHQNLFDIGATSLTAMRMVVLIEKHFSTSVPLSLFISYPTVAQLAAHIREEGGHPKFSPLVPMRTTGHKQPLFFVHPMGGNVLSYLRLVKYFPDDQPFYALQAHGVDAGSIPLNSIQEQAANYLEAIREIQPHGPYSIGGWSYGGFVAFEMARQLKEQGENVTDLFILDTVAVNASPQTTINEGALLRWFFWELLWLNEGATLSEQTLPEQITSLQEQFEYITEHAIATGAIPQGSSRAVIQRLFDVYKANWKAATDHAAYKADINMTLLHATRPLPVILRSMHDAVRSEYRDPKNGWENKTSGYINVIDVPGDHLEIMEEPYVQEVAKVILQEMKKSSTKQVISDSEKICPVH

SEQ ID NO: 6179 - protein, 369 aa, Xenorhabdus sp.
QRLGYEVEVYEQATTLPTARSGLSVITNAVAALSSIGVNLKLENFGAPVKNFEIRNVKDQLIRRMPVPEISSSNGFDSVCLSRKALQEALLQQLDQSIIHVDAKVDEIIESDNAVIVRFADGRETQGDLLIGADGIHSVVREYLQGNQPLRSSDYICWLAITRYQHPQITPGYVVHYLGQGKRIGLIDIGGGEVYWWGTAYMSNEQACLCERSNQDVLAYFEGWPTIVSDIISQTPSEDIISVSAQDRPFSPLWGKGRITLLGDAAHPMLTTLGQGAGMAIEDAAVLGHMLKQQPDPVAALRQYEKVRIPRTELFVNESKIQSDLGQEDGIFDCQQRELSLQSLPETALREDFERFLHFPVGDLTLQTL

SEQ ID NO: 6180 - protein, 617 aa, Xenorhabdus sp.
MENAFQKARWLRDLQRFLPLKSQFILSGNVRDLQAYEIAPEVMTPLGLGQVLQNTLFDMGYTHIMTFNPLSGFTLINHSSRSEDQGKVLLQRMGLPINTNSIPGGIDLLNSVLEKWVEYPDEPIALCVDFASCLISQRENLAAIEHHLFTRALVLSHQAKARPAGLQRQPFFNTIFWIVEKETDLPDWFLINNPRIRHIPVAKPDGQMRRALAPTLLRSLPDFDQISHNEYTVLLSDFIDETEGLLLLDLTAIIQLARFEKVPVTRISDAVRRYKVGITEDPWQKIDKNKIRNAYDIIQRRVKGQHHAVTHLLDIIKRAVTGVGSSKSGRPRGVLFLAGPTGVGKTELAKIVTQLLFGDESAYIRFDMSAFSAEHADQRLIGAPPGYVGYNTGGELTNAIREKPFSVVLFDEIEKAHPQLMDKFLQIIDDGVLTSGRGDRVYFSESLIIFTSNLGIYRLNNEGERIANTTPDEPFDTVQQNIKREIERHFKLVLNRPELLNRIGENIIVFDFIRPDVAEQIFNQMVSNILRDLEKQDLFITIADTVITTLKSRCLADLSNGGRGIRNQLEIHLINPLSRAVFDLSECADKSFCIEQIALGETGEITTVQLVPVKESV

SEQ ID NO: 6181 - protein, 198 aa, Xenorhabdus sp.
VTSLGPGKRIGIWTQGCSIRCKGCMSPDTWRPTQQRIAINTLMTQLTPWLTKADGITISGGEPFDQPEALYTLLKSLRRHFSGDVLVFSGYEYRILKTKLQTMVGLIDALVSGPYRQEATQALRLRGSDNQELHLLTPLGRQLYHSYHLPLEKTDKVLDLALDAQGRVFIAGIPEKGDMERFRDLLIQGDHQVTQIKK

SEQ ID NO: 6182 - protein, 474 aa, Xenorhabdus sp.
VNGHPMEEDDLICLQCGGDAAEFSVEDNTDQNTLFLSAEASIESAFTEPTSNNLMSVGNWLVGERINNKTNLRERYHVTHQETSRQGVLTLYQQGEEPDLSVYDVYRLLPNNHVPELLETGRQYDRSWHVTEYIPGGSLEDFIALGNEWQQEEIPQLIMEIGQALNTFSERGLRHRNLKPSHLMIRQHSPLDIVVIEFGSACLSEFELDTVSPLDISRYSAPETLAGGVSAASDWWSMGIILLEQITRGRCFEQVHTNAFLIQVMAHGITIPDDLDENIRILLLGLLARDRTQRWQWPEVSAWLDDRPMAAPVEINQQIPQHGQQIILAGQEYNQPAQFALKAAEVMQWNEALSLLLRGELISWLAGMSHYESIRKQLRLFLDTQDIDDNFRLTLTLKVLNPDIPFIYCGEIITPSWLLEHADIGYRLINDPLSQLLRQIEPEHWLVQLNYRQQQVYGRAEKLEISLNENSLRV

SEQ ID NO: 6183 - protein, 388 aa, Xenorhabdus sp.
VLTFAGTPMSIGERNLPTFYKWSGKTPEQAGQLLRVEPLKSAQSLSNAKQNIRILYSSTDGIDGHSPITVSGALFLPKGTPPKGTPPKGGWPLLAWAHGTVGIANICAPSFAGRSKRDIGYLNYWLKQGYAIVATDYQGLGTPGLHPYSDYRATAYSLLDSIRAVQQGNFHLSKKTILIGQSQGGGATFAATLYAKSYSPDLDIVGAVTTGTSVPDAIKKIVKRDDTVRHTLAYLLLAINTVPLVKPSLSPEDYLSDKAIPAFRLSQTHCLRDIEKQIFSDNLTGANSFKKDPSPLIQAIMSVRYYPAIKTEIPIFWGTGGQDVDSPKDGQVQLVTAACKLGSHIEWHLYPGLSHSATMKGSLPDSTIFVKRAFSGEHIDGNCSTSTE

SEQ ID NO: 6184 - protein, 437 aa, Xenorhabdus sp.
MVSNAALPAAMASQELPSLAPMLEKVLPSVVTVHVAGTEVQTQQLQLPEDFQFFFGPGFPPVEQQRSRPFQGLGSGVIINADKGYVLTNNHVINNADKIKVQLNDGREYSAKLIGRDPQTDIALLQLKDAKNLTAIKFANSDQLRVGDYAVAIGNPFGLGQTVTSGIISALGRSGLNLEGLENFIQTDASINRGNSGGALINLRGELIGINTAIVAPSGGNVGIGFAIPSNMARNLADQLIAHGEVKRGLLGIKGTEMSADIAKALNVDAQQGAFVSEVVPKSAAAKAGIKPGDVLTSIDGKKINSFAELRAKIGTTAPGKEIKVGLLRKGKPMEVSVVLENSESPSTKAEKLSIALQGANLSTGIVNNTPGVKVDGVAKNSPAAMVGLQKNDLIIGANNVRVKNINELQKVLEGKPSVIALNILRGGDNIYLLLNN

SEQ ID NO: 6185 - protein, 329 aa, Xenorhabdus sp.
PSLRPNKLNNLLYSDNTEKPSSYSQGVRRAAPAVVNIYSTSIGSFSHEPRELLPLGSGVIMSEQGYILTNKHVINKVGSIIVALQDGRFYEALLVGSDGPTDLAVLKIKAENLPVIPINLKRAPHVGDIVLAIGNPYNLGQTITQGIISATGRVGLSPTRRQNFLQTDASINQGSSGGALVNTLGELVGINTLSFDKSEFGSTPEGLGFAIPTALATKIMQKLIRDGRVIRGYIGISTKELPNIRSSDTQIHQIQGVRVFQLLPGSPAKKAGIQVGDIIISLNQKPALSPAEIMDQVAEIRPGKVVPVTVLRDGQTLTFNVMIEEFDEY

SEQ ID NO: 6186 - protein, 90 aa, Xenorhabdus sp.
MAITRLRQQGGAVVITIPSDVATVMGWSVGMTLDIQPSGDTINIKPTGRVARGRKSLSELLQEIDETEVRAFNEVTADDLNSTPVGNEVI

SEQ ID NO: 6187 - protein, 418 aa, Xenorhabdus sp.
MDKFQVKGPTCLSGEVTISGAKNAALPILFAALLAEEPVELQNVPELKDIDTTIKLLNRLGTKVECKNGSVFVDASAVNEYCAPYELVKTMRASIWALGPLVARFGQGQVSLPGGCAIGARPVDLHITGLEQLGAKIVLDEGYVKASVDGRLKGASIVMDKVSVGATVTIMAAATLAEGKSIIENAAREPEIEDTANFLNTLGAKITGAGTDRIVIEGVERLGGGVYRVLPDRIETGTFLIAAAVSRGKIVCRQAKPDTLDAVLAKLREAGADIQVGDDWISLDMHGKRPKAVTFRTAPHPGFPTDMQAQFSLLNIVAEGAGMITETIFENRFMHIPELIRMGAHAEIESNSVLCHGVEKLSGAQVMATDLRASASLVIAGCIAEGTTTVDRIYHIDRGYEHIEDKLRGLGANIERIK

SEQ ID NO: 6188 - protein, 87 aa, Xenorhabdus sp.
EQDMDTNEIKQVLMEKLVLDEVIVSGDGSHFQVIAVGEIFGELSRVKQQQTVYAPLMEYIADNRIHALSIKTYTPAQWQRDRKLQGF

SEQ ID NO: 6189 - protein, 111 aa, Xenorhabdus sp.
MDKASDKTPLSWQQTRSTLFLKGTLDRDSLLPFWQQKDSLLAHIENIDVSGLEHVDSTGMALFVRIKGDWQQRGKVLTFSGIGERLNTLIALYSLQSLFADNSPEKGNSPE

SEQ ID NO: 6190 - protein, 203 aa, Xenorhabdus sp.
MAALLVVAPLANAVDQTNPYALMKVAAEKTFSRLKVEQAQIRANPEMLPQIVRQELLPYVQVKYAGALVLGPYYKQATPEQRDAYFKAFEDYLAQAYGQALAMYHGQNYQIAPEQPLGDKNIVAIRVTITDPNGQPPVRLDFQWRKNSKTGYWQAYDMIAEGVSMITTKQNEWSEILRQKGIDGLTEQLKISAQAPITLEKKK

SEQ ID NO: 6191 - protein, 170 aa, Xenorhabdus sp.
MQSKKNEIWVGSFILIALAAIIFLCLKVANVRSFGSQTTYHVIAAFDNIGGLKERSPVKVGGVVIGRVGKIWLDKKTYTPQVELDIFSQYDNIPSSSSLSIRTSGLLGEQYVALNVGFDDADLGITMLKDGDRIEDTKPAMVLEDLIGQFLYKSGSGDQQKSSEAPAQVH

SEQ ID NO: 6192 - protein, 260 aa, Xenorhabdus sp.
MLTRALATFGRRAIEVVASFGRAGFMLFSAIIGKPEPAKQWLLLRQQLYSVGVQSLLIIVVSGLFIGMVLALQGYLVLRTFSAEGSLGMMVALSLLRELGPVVTALLFAGRAGSALTAEIGLMKATEQISSLEMMAVDPLRRVIAPRFWAGFISMPLLSLIFVAVGILGGAMVGVDWKGIDGGFFWSSMQSAVELQKDILNCFIKSLAFAITVTWIALFNGYDAIPTSEGISRATTRTVVHASLAVLGLDFVLTALMFGN

SEQ ID NO: 6193 - protein, 272 aa, Xenorhabdus sp.
MSQLTANLIEICGMSFTRGQRPIFSDINLTVPKGKITAIMGPSGIGKTTLLRLMGGQIRPERGEIWFDGDNIPALSRQRLYEVRKKMSMLFQSGALFTDLNVFDNVAFPLREHTKLPEELIYTTVMMKLEAVGLRGAAKLMPSELSGGMARRAALARAIALDPDLIMFDEPFVGQDPITMGVLVKLIDELNHALGVTCVVVSHDVPEVLSIADYAYIVAEQKVIAEGTPEQLKMNQDQRVRQFLDGIADGPVPFRFPAGDYKTELLTNRNRY

SEQ ID NO: 6194 - protein, 29 aa, Xenorhabdus sp.
MHSGSNITNLLLITGPVALDPPHKNAIQN

SEQ ID NO: 6195 - protein, 199 aa, Xenorhabdus sp.
MCDREMRCYPGEVRTETPENQPTRIVGYGSVFNSRSEPLWGFREIIKPGAFDEVLNDDVRGLFNHDPNFILGRSTAGTLTLTVDERGLQYSIQAPDNQTIRDLVLAPLQRGDITQSSFAFRVARDGERWYEDDEGIVIREIHRFSRLYDVSPVTYPAYQEADSAVRSLNQWKEARDSGAFRQAINQKQARERLLTLLNI

SEQ ID NO: 6196 - protein, 37 aa, Xenorhabdus sp.
VTLAIMLTVGYWYENREAQALPTGFKALLEPYRFIPL

SEQ ID NO: 6197 - protein, 108 aa, Xenorhabdus sp.
MRAGALRHRIKLFRPVIERDALGAETLIPHYVTTVWAKAKALSNRKTRTADQQQVIEMQEFTVRPRKDIDIDWLIEHQGRRFTVRAVDNNRPDRTIISTEAEVRHDRA

SEQ ID NO: 6198 - protein, 98 aa, Xenorhabdus sp.
VTYQRISDPAFDTGLAPAQLIEGRFQISIITQNYTQALQLEATLGTAWEAIQHGVIGRTPVQSVTRGALLQEMVEETNNRKRYRITRDFIIAYTEADR

SEQ ID NO: 6199 - protein, 482 aa, Xenorhabdus sp.
MIYAQGTISIVSGSAIVRGTGTKFKDNLSGIAPGQVILIQSGSSNLLHMIQAVNSDTELVLVDNVNMTLNNVTYQIQVTVPDSVSDGVRHMVAINAYIVQFLQNMDKWMSQNGAVEVTLPNGQTVSLQSIKAMNEAIAGKLDKDQNGADIPNTSAFVGNLGLTDTRNLVKKVIHSSGNWIMVGDESKQGWLGKSDNDIYVGNSKSNKYLELKDDGQLKYGGTQIIRQGDFGVGSHDLSGNNDAGYLWNVAGDQPTGFYSYTPKSHQDEQWGSFIKLRWNEGNQQYLILPNFGADAMRIVRYIGGDSWTDYTVWTTGNTTVDGSGYLKKASPIIQIYPTGKFTTNDESEGATVSKPGLGHYQVTGVLGYNADKAWGVHGGISSPKNNNGLELIYIDDKVNKDGSITIETFHRQHSHLPARFQNKRIKEIVNGEKVYYQDGEPCDIPEGCRLDVRVQMPANSVWNVKQKEAKVAADSEQTEQVE

SEQ ID NO: 6200 - protein, 388 aa, Xenorhabdus sp.
MKPLAALIGLLVISGSAGAVTVYNDKGTKVDLIGQFRLKAKTTSQDRDINIRDDGSRIGIGGSHQLTRDIRVFGKMEWGSDTQRSNSDNSKTSFEMYNRLGYIGASHRDYGQIQLGRTYIPIDWVKKSSYGYGNTGVFYFSDVLSRATGYSNDGVGKNNFVTRLPQTIFIQTNSYEGFKLAATYSGKSGSDKDRQHGDLRHAYSVVGFYESKFGLKFDAGYSAATGEAHRKIAGGERKVSDVSPQDSLLAFGMEYYFPGREFSVGVDYGQARSRNSGMIYQEGRNNKLSSNSVKGNWKANLYGLGAKWHWDKIESGMYAGYYLRDGDSNTFNYKKQTYTVGLDKRFSVSQYNSIRLFVEAAYDDARSDNPVYRDKKQTILETGARLFF

SEQ ID NO: 6201 - protein, 651 aa, Xenorhabdus sp.
MLNHGLKISSLAMLVAFNVNAATVDLRVMETSYVHSNLMDFDYFKDKPTEQFGLVRTASLIKAAKSEVTNAILVDNGDLIQGSPMADYMAAKGLKQGEVHPAHQLMNTMGYTVGNFGNHEFNFGLDYLKQAIAGAEFPYVNANIMDAKTGKNYFTPYIIVDTPVKDREGKEHTIKIGYIGFVPPQISIWDKANLDGKVVVNDITETAKKFVPEMKKAGADLIIAIPHSGFSQEPYKAMAENSVYYLSEVPGISAIMFGHSHGVFPNKEYAGIKGVDVTNGTVNGIPAVMPGQWGDHLGVVDMVINNDGGEWKVESAKAEARPIYDKAHKKALVERDDKLAAIIDKANQGTRDFVGKHIGKASANMYSYLALIQSDPTVQIVNDAQVDYTKRFIKGDPDLADLPVLGAAAPFKAGGRKNAPADFVEVEKGDLSFRNAADLYLYPNTLVVVKASGADVTEWLECSVGMYNQIDPNSTKPQELLNWDGFRTYNFDTISGVNYKVDLTQPAKYDTDCQLINKDANRIKDVTYQGKPIDPKATFLIATNNYRGYGGKFAGTGEDHIAFASPDENRSVLAAYISRTTKEQGVVSTQAENNWSFLPIKTDKQLDIRFETSPSEKAAKFIKEHAQYPVKYLKNDDVGFAIYQIDLTDKK

SEQ ID NO: 6202 - protein, 535 aa, Xenorhabdus sp.
IVIGTALLAGCATKPANESSNIVDVRVLGLNDFHGALKAPKNQSGGIEHMATLIKELKQDNPNNIVVAAGDLIGASPLLSSMFHDEPSIEALTLAGLEATSVGNHEFDKGKTELLRKQNGGCHPVTGCQGPAPFKGAGFQYLSANVTVNETGKTLFPEYVIKEFEGIPVAFIGLTLEGTPAIVTPQGTAGLSFSNEVKTINALVPELQKKGVKAIGVLIHEGAMQRRDAGGVDVNACNGITGKIIDIVNQLDQEVDFVISGHTHQAYNCVINGKSVTSAQANGALLTKLDLKLDKTTRDVVDFKAKNIWVDNYKYGKDPKVTELLSSYEKIATPLANRVIGKLESDLNKKPTSGGESALGKVIADAHLYATTAKESGGAVIAFVNNGGIRAPMDAGDVTYNAIYTVQPFSNVMVTKTLTGEQIKRALEQQWDRTRPSVMAVSHTLEYSWDSSKPAGQRVIASSMKINGKPVDMKAKYRVAANEYLATGGSNFSVFKEGTDPVYSVPDVDAVVKYFAEKSPIAYPKKDRITDISSQ

SEQ ID NO: 6203 - protein, 538 aa, Xenorhabdus sp.
RLIKNKIARVLTCSISLILGSATYSYAAVVPAGTQLAEKQEITRNNFSEPASLDPHKSDGSSEFDILVDLFERLVDTDKEEKIIPALAERWETKDNKTWFFYLRKEAKWSDGSPVTAHDVVFTWRRLVTPDTVSPYGSYLVQANVINAQAVLSGKKKPEELGIKALNDTTLEVTLEKPKAGLLQMLAHPVMSPLNEKVVTKHGNKWTQPQFFVSNGPFTLSEWVVNEKIVGVRNPHYWDNKNTIINKVTYLPISDYKADLNRYLAGELDISNGGPTDFFSKLQKELGDQFHIKPIMSVYYYYFNTQKPPFNDVRVRQALTLALDRDVIAGKVLGQGQRPAYYVVSEGSGGMDLKQPDYASWTQEQRVEKAKALLNEAGFNEVNPLKFKLLYNTSDGHKRIAIAASSMWKKNLGVDAILENQETKSQTESLYQGNFEVGRYAWQADYNSPFTFLEIFMAGNTNNITKYSNPKFDELVLKADESNDQEIYQKALDIITHDSPAIPVYYYVRVKLVKPYVGGLFISPLGHIMTKDLYIIKH

SEQ ID NO: 6204 - protein, 537 aa, Xenorhabdus sp.
IKNTTSKVLTCSIAIALGCISLSAQAAVVPPGTELAEKQEIVRNNGSFPASLDVHKVESNTELDIIHDLFDGLVYTDKKGNIEPRLAERWETKDNQTWVFHLRKGIKWSDGTPITAHDVVFSWRRLLEPTMGSPYGSYLATAHVTNANDVLLGKKKGEELGVKALDYSTLEVKLDKPVAYFLQMLTHPVMVPISEKTVNKYGDRWTQPETFVGSGAFKLSEWTVNEKVVGVRNPQYWDDKNTVINKVTYVTIVSEKADLNRYLAGEIDITKTIALDAFASLKKEIPDQMHITPMLSTYYYAFNNKKPPFNDVRVRLALSLAIDRDVIADKVLGQGQLPAYNVLPPNIGGLNITLPEYAGWTQEQRIKKARELLNEAGFNKNNPLKIDLLYNTRETHKKIAIAVSSMWKKNLDVNAVLQNQEWKVMLDNMHQGKFDIVRYAWTADYNSPMSFLDIFVTGNSNNIQLYENSDFDQMVLKSGETNDIKHYQNAMDIITNDTPVIPIYYYVSNKMVKPYIGGFHPTPMEYISTKDLYVIKH

SEQ ID NO: 6205 - protein, 329 aa, Xenorhabdus sp.
VVRNNGSEPVSLDVHKVESDTDFNIIYDFFDNLVYTDKQGNIAPLLATSWETQDNQNWVFRLRQDAKWSDGSSITAHDVVFSWQRLLDPAVGSPYGNYLIDAAVMNAKDVLKGTKSANELGIKALDNYTFEVKLDKPIGDFIQRLAHPVMVPVSEKVVRKYGDKWIQPEHFVSSGAFKLSEWIVNEKIVGVKNPYYWDNKNVVINKVTYLTLESAKSDLNRYLAGEIDITLTIPQDSFASLKQKYPEQVHVSPRLGAYYYEINNGKAPFTDIRVRQALNLAIDRDIIADKVLGQGQKPIYTFLPPGIGGFDFKQPDFADWTQEQRVEKA

SEQ ID NO: 6206 - protein, 169 aa, Xenorhabdus sp.
QFHLMSAALCAISDMILIMAGIFGGSALLGQSTFLLQAVTWGGVAFLLWYGWGAFRVALSADFTLSNKDVVVQSRWRIIVTLFAVTWLNPHVYLDTFIVLGSIGGGLSAELRPWFTIGAVTASISWFFALAILAAWFSPILNQPRSQRIINLFVGCVMWYIAWNLLKQG

SEQ ID NO: 6207 - protein, 95 aa, Xenorhabdus sp.
CSKVFGRSLRVNCPPEQIEALQAAADELDQRLHNLKERTRVTNTEQLVFIVALNICHELAQEKMKTRDYAYNMEQKIKMLQQTIEQALLEQGNKS

SEQ ID NO: 6208 - protein, 182 aa, Xenorhabdus sp.
IRQLRKNLSPEQQLRFALQAVERVMEHPKILQAKKIALYLSFDGELDTRPLIQQLWQQNKQVYLPVLHPFSRNHLLFLRYQPDTPLIRNQFRIEEPPLDIRQVLPVSELDIMFIPLVAFDRSGQRLGMGGGFYDRTLAKWQQQNFYPIGLAHNFQLVDSLPSASWDIPLPEIITPEKTWRWV

SEQ ID NO: 6209 - protein, 301 aa, Xenorhabdus sp.
MKRPDYRSLQALDAVIRERGFERAAQKLCITQSAVSQRIKQLENLFGQPLLVRTVPPRPTEQGQKLLALLHQVELLEAQWLGDENGNETPLLLSLAVNADSLATWLLPALHPVLSDLPIRLNIQVEDETRTQESLRRGEVVGAISIQSQPLPSCLVDKLGALDYLFVASPKFADRFFPNGVTRSALLKAPAVAFDHLDDMHQAFLQQYFDLSPGSVPCHIVNSSEAFVQLAKQGTTCCMIPHLQIDRELKAGELVDLTPGLYQRRMLYWHRFAPESSAMRKVTDALLKLGRQMLRQEDEIN

SEQ ID NO: 6210 - protein, 229 aa, Xenorhabdus sp.
VNTNVHEASSSLNVELKMAIQPKIPLSYTLFLGTFPETNQLRRSVNQLINTLRPRPYKPYLHYNSWMDIGFGSAYTEQDVLKRIDEWNKEFITGRGVKLDAFLLDDGWDDLTGRWLFSPAFSHFDTIRNKAASLHSSIGLWLSPWGGYGESGKTRVSHAKEYGFETANGGLALSGPNYFKSFNAQVLNLIKNEHITSFKLDGMGNANSHIKGSPFASDFDASIALINNM

SEQ ID NO: 6211 - protein, 166 aa, Xenorhabdus sp.
MYHGIVSAKSSYDGLEKVQTDLVLTDHVWSYFATGSQLQELYITPSMLNKAKWDTLAKAAKWSRSNSDVLIDSHWIGGDPHALKIYGWASWNKRKAILGLRNPSDKEQTYYLDMAKDFEIPRGETSHFRLIPVYGNNSTVPENYTKAVTVTLKPLEMLVFEAVPMK

SEQ ID NO: 6212 - protein, 275 aa, Xenorhabdus sp.
MMYWINGKPQDQISVNDRSVQYGDGCFTTIRVEQGQAAFLPFHMKRLQKGVERLFMPVPDWVKLESHIQQVVTGYESGVLKVLLSRGSGGRGYSSDGINGPNQILLLSPYPEQYYKQRKTGVVLGLSPVAMGINPHLAGIKHLNRLEQVLIKRFIDQEKIDEALVLDSDGLLVECCSANIFWRRGKNIYTPDLSQCGVEGIMRQKIIQLLEGSDYHLSCVMRYPEALAHADEVIICNSLMPVMAVNQIQAHKNQPAWKYQSRELYEYLLSECLSL

SEQ ID NO: 6213 - protein, 306 aa, Xenorhabdus sp.
KVNLAQDLIFTLPVGMGRIGLETLLIQHNLIKDNGLLPWLFRLEPELIKFKAGTYRLQKNMSVREILQLFASGKEVQFTIRFVEGSRLSDWSKILQNAPYLKHAAEDKTPQELAESLGMKIESPLEGWFYPDTYLYTAGTSDIDLLKRAHQKMVMAVDQEWKNRAENLPYKSPYEMLIMASIIEKETAVDAERAKVASVFINRLRLKMRLQTDPTVIYGLGDKYTGTIFRSSLSTFTPYNTYMIEGLPPTPIAMPGLASIKAAAHPAVTNYLYFVADGNGGHTFTTNLIEHNRAVNLYRQRLKQDK

SEQ ID NO: 6214 - protein, 213 aa, Xenorhabdus sp.
MNSKFIVIEGLEGAGKTTAIQTVSDTLKQSGISDLVFTREPGGTPLAEKLRQMIKQGIEGEILTDKAEVLMLYAARVQLVENVIKPALAKGCWVVGDRHDMSSQAYQGGGRNIDQHLLASLREAALGDFSPDLTIYLDLPPEVGLQRARERGELDRIEKESLDFFHRTRTRYLELVAQDKSIIKIDATQPLEKVQDDIRQALQYWLEKQEIHA

SEQ ID NO: 6215 - protein, 413 aa, Xenorhabdus sp.
MVKVSLEKEKIKFLLLEGVHQSTVDNLRAAGYSNIEYHKGALEPEELKEAIRDAKFVGIRSRTQLTEEIFAAAEKLVAVGCFCIGTNQVDLNAAAKRGIPVFNAPFSNTRSVAEMVLGQLLLLLRRVPEANAKAHKGIWNKQAAGCYEARGKKLGIIGYGHIGSQLSVLAESIGLNVYFYDLEHKLPLGNAQQVHHLSELLNMSDVISLHVPETHSTKNMIGAAELELMKPGSILINASRGTVIDIPALTEALEIGHLSGAAIDVFPEEPATNSEPFVSPLIKFDNVLLTPHIGGSTQEAQQNIGYEVAGKLVKYSDNGSTLSAVNFPEVSLPLHAKDTNRLLHIHENRPGILTSINQVFTDQEINIEAQYLRTEGDMGYVVIDIMTKNPAQAELVLQQLKALPGTIRSRMLY

SEQ ID NO: 6216 - protein, 219 aa, Xenorhabdus sp.
MTQDELKKAVGWAALEYVKPGTVVGVGTGSTASHFIDALGTMKDQIEGAVSSSEASTEKLKSLGIPVFDCNEVDSLDIYVDGADEINAQMQMIKGGGAALTREKIIAAVAKKFICIIDESKQVDVLGKFPLPVEVIPMARSYVARELLKLGGTPVYRQNVITDNGNVILDVHNLAILNPIELENKINAIAGVVTVGLFANRGANVVLVGSSNGVKTITE

SEQ ID NO: 6217 - protein, 242 aa, Xenorhabdus sp.
VKRNSLIFAVMLAVGSMSVSAAELPSVPHISTSGSATIKAAPDMATLMIHVKVSQKSATEAKHKVDARVAKYFDFLKASGIDKKDINAANIRTQPEYQYDQKNGKSTIIGYSASRSVEVKVHKLDQLNPLLDGALKAGLNEINSVQFSVADPQLYRSEARQKAIANAIQQATELAKGFNSKLGAVYSVTYRPPEAVPYPMNRLQLRTTQMAAAPAGDSADETYEPQSIEFSDHVDAVFELQR

SEQ ID NO: 6218 - protein, 290 aa, Xenorhabdus sp.
MEEINLSGEIDKATHWLVNNQEILTQYAMNIVFAILILIVGLSIAKLACKAVKRVMSLRGVDTTISDFLSAIIRYAIIAFTIIAVLGRLGIQTASVIAVIGAAGLAVGLALQGSLSNFAAGVLLVIFRPLRVGEYVIIGSVEGTVVQVQIFSTTLRTADDRIIVIPNGKIITNNIINTSREPNRRTQIMVGVAYDADIDEVKKVLGDVIQADNRIQHDKGVTIRLHEMAPSSLNFIVRVWTTNGDAWSVYWDLMENFKRALDKHKIGIPFPQMDVYLHQQQIALQKNTNN

SEQ ID NO: 6219 - protein, 125 aa, Xenorhabdus sp.
YVMEYEFMQDITGQVTTRFSMDHEAIGHWLNEEVKDDLSILDKITAALLEIKGSARQWQLNGHEYTLLMNEEEIMIRANQLQFDTEEMEEGMSYYDNESLAFCGTDDFIDMLANYRDFVLQKNKG

SEQ ID NO: 6220 - protein, 943 aa, Xenorhabdus sp.
MDNIEVRGARTHNLKNINLVIPRDKLIVITGLSGSGKSSLAFDTLYAEGQRRYVESLSAYARQFLSLMEKPDVDHIEGLSPAISIEQKSTSHNPRSTVGTITEIHDYLRLLFARVGEPRCPEHDIPLAAQTISQMVDNVLMLPEGQRLMLLAPVVKERKGEHSKLLDNLAAQGYIRARIDGEVCDLSDPPKLELQKKHTIEVVIDRFKVRPDLVQRLAESFETALELSGGTAVVANMDDEKAEELIFSANFACPMCGYSMSELEPRLFSFNNPAGACSTCDGLGVQQFFDPDRVVQNGGISLAGGAIRGWDRRNFYYFQMLKSLADHYKFDIETPFDELSASIKKAVLYGSGKETIEFRYTNDRGDITVRKHPFEGVLHNMERRYKETESSAVREELAKYISNRSCISCEGTRLRKEARFVFIENTTLPQISDFSIGHAMEFFQNIKLSGQRAKIAEKVLKEIGDRLKFLVNVGLNYLTLSRSAETLSGGEAQRIRLASQIGAGLVGVMYVLDEPSIGLHQRDNERLLETLLHLRNLGNSVIVVEHDEDAIRAADHIIDIGPGAGVHGGEVVAEGSIDNIMASKESLTGKFLSGERKIAIPEQRIAADPDKMLKLIGAKGNNLKKVTLNLPVGLFTCVTGVSGSGKSTLINDTLFPIAQRQLNGATNINPAPYVDIQGLEHFDKVIDIDQSPIGRTPRSNPATYTGVFTPVRELFAGVPESRTRGYTPGRFSFNIKGGRCEACQGDGVIKVEMHFLPDIYVPCDHCKGKRYNRETLEIKYKGKNINEVLNMTIEEAREFFDAVPALARKLQTLIDVGLSYIRLGQSATTLSGGEAQRVKLARELSKRGTGQTLYILDEPTTGLHFADIQQLLAVLHQLRDQGNTIVVIEHNLDVIKTSDWIVDLGPEGGSGGGEILVAGTPEEVAKCKNSHTARFLKGILNNN

SEQ ID NO: 6221 - protein, 100 aa, Xenorhabdus sp.
MRQVSLHILPGDTGYGSTFLGLHFYTWAAVMSILTIIAIAVIMPLKAGNHDPVKSSPHILGKLAMGLFALLIAANLVSTILECGSGQCDDNPTFYQLLQK

SEQ ID NO: 6222 - protein, 352 aa, Xenorhabdus sp.
MSGVQQDPIHHAEGDVATHTQMVLSALVQLPEYQALEKEEQEILWVSALLHDVEKRSTTRMDWDGRIISPGHARKGELTVRQILFQQVATPFAIREQVAALVRFHGLPLWLMEKPEPQKALLAASLRIDTYLLALLAKADVLGRECHDAKELLERIDLFELYCREQNCWRNARQLPSSEARFHYFSTESEQPDYQPYDNYGSQVILLCGLPGMGKDHFIRQYYPDRAVISLDNIRRQHQISPEDKNATGWVVQQAKKQAREKLRNQQDFIWNATNLTVQIRQQLIKLFVSYNARVKIVYIEQGYKQWRQQNNHRQYVVPDKVMDRMLSKLEVPTPEEAHEVCYFINGLSISG

SEQ ID NO: 6223 - protein, 119 aa, Xenorhabdus sp.
VRMKDMWLSWEEVKFYADLFDFPTIPEIVIPETRNEPAFIDNIIQTAKQESYFSSWDTKTKQPCSMEGIVSRNAGEYSVTDFSHNVFKYVRKNHVKTDIHWKRHWQRAPLYFEYMNGER

SEQ ID NO: 6224 - protein, 398 aa, Xenorhabdus sp.
VFQNVDAYAGDPILSLSEEFKKDPRPEKVNLSIGLYYDEQGITPQLQAVATAEEQISTLPQSASLYLPMEGLMAYRQVVQELLFGKDHLMLQQNRIATIQTVGGSGALKVGADFLHRYFPDSEVWCSDPTWENHASIFSGAGIKVNYYPYFDDKTKGVKFDEMLATFRQLPAKSIILMHPCCHNPTGSDLTNDQWDQVIQVVKEQKLIPFLDIAYQGFAEGIEEDVYAIRAMASAELPCFVSNSFSKIFSLYGERVGGLSVICDDKETKECVLGQLKACVRRIYSSPPNFGGQVVARVLADPLLREQWLREVEQMRLRIREMRTVLVSALKEALPEKNFDHLLKQRGMFSYTGFSTEQVVRLREEFAVYLIESGRVCMAGVNHHNVQRVVEAFVAVSR

SEQ ID NO: 6225 - protein, 359 aa, Xenorhabdus sp.
MKAATAVIDRRALRHNLQQVRVKAPGSKIIAVVKANAYGHGLLETAYTMESADCFGVARIGEALALRSGGVIKPILLLEGFLGASDLPILVVNHIETVVHSIEQLEALEQADLPHPIKVWMKLDTGMHRLGVRIDEAEDFYQRLSRCRNIEQPVNIISHFSQADEPLVDTTYQQIEQFKLFVADKAGEKSISASGGILLWPQAHLDWVRPGIMMYGASPMADKTADDFSLMPAMTLKSSLIAVRKHKAGEAVGYGGTWVSERDTYLGVVAIGYGDGYPRSALSGTPVFINGRKVSLVGRVSMDMITVDLGPDCQDKVGDDVILWGKVLPVEKVAEYTGISAYELITKLTSRVAMEYLDE

SEQ ID NO: 6226 - protein, 469 aa, Xenorhabdus sp.
MAGRKPTNNSMAEPKDRQVEGLKLPPHSLEAEQSVLGGLMLDNERWDNVSERVTSNDFFSRPHRRIFSEMQRLLETGKPIDLITLSESLELNGELDNVGGFGYLAELSKNTPSAANINAYADIVRERAVVRDMIAVANEIADAGYDPQGRTSEELLDLAESRVFQIAETRASKDEGPKGIEQILEETVERIEQLYQRPHDGVTGVSTGYQDLDKKTAGLQKSDLIIVAARPSMGKTTFAMNLCENAAMMQDKPVLIFSLEMPGNQIMMRMLASLSRVDQTRIRTGQLDDEDWARISSTMGILLEKRNMYIDDSSGLTPTEVRSRARRVFREHGGLSMIMIDYLQLMRVPSLSDNRTLEIAEISRSLKALAKELQVPVVALSQLNRSLEQRADKRPVNSDLRESGSIEQDADLIMFIYRDEVYHDNSELKGVAEIILGKQRNGPIGTVRLTFNGQWSRFDNYAGPSYSDE

SEQ ID NO: 6227 - protein, 105 aa, Xenorhabdus sp.
MTEALKTQNEDLRTIELEAPLARGNGKITEVTVRKPTSGALRGARLQALLEMDVDSMLLILPRVTTPALTKNDLMMMSPGDLINLSVEVVNFLLPKSVKSDSQND

SEQ ID NO: 6228 - protein, 172 aa, Xenorhabdus sp.
MALPRKLKYLNLFNDGNNYQGIVEELTLPKLSRKLEAYRGAGMNGSAMVDLGLDEGALDAEFTLGGIESQLYKQWGIAQVDGVMLRFAGSFEREDTGDVVAVEVVMRGRFQEFDHGTYKQGDNTQTKITAKNTYFKLTWDGEELIEIDTVNMVEKVGGEDRLAQHRRAIGLF

SEQ ID NO: 6229 - protein, 391 aa, Xenorhabdus sp.
MAQDYHHGVRVQEINEGTRTITTVSTAIVGMVCTGPDADAKTFPLNTPVLLTDVMSASGKAGQKGTLSASLKAIAAQALPVTVVVRVEEGESEEATISNIIGGVTEAGKKTGMQALLAAQSQLGVKPRILGAPGLDSQPVAAELTSIAKQLKAMAYVSAYGCKNISEVIKYRENFGQRELMLIWPDFLSWDKGEVIAPATAYALGLRAKIDEETGWHKTLSNVGVNGVTGLSADVFWDLQAIGTDADLLNQNHITTLIRKNGFRFWGSRTCAGADSEDSLFQFESYTRTAQVLADTMADAHMWAIDKPLTPSLVRDIIEGINAKFRELKAGGYIIDGRCWYDDKINDKDTLKAGKLTIDYDYTPVPPLENMMLRQRITDSYLMDFAKSINK

SEQ ID NO: 6230 - protein, 93 aa, Xenorhabdus sp.
MANETYVRAKIDPKTKELATIALQSMGLTVSDAIRMLMVQVAEKNTLPFKVKGTHYRNASRTKAAIKQLESGNGKTFDSVSAFMDDLNNDEED

SEQ ID NO: 6231 - protein, 78 aa, Xenorhabdus sp.
MAGDFRTQFDEALKEADMDDVRQTISDVRNLNPTNSLRDAMNPLRQLGNEIKSDLQKATTPPEGLSSTPAPAASEPVA

SEQ ID NO: 6232 - protein, 50 aa, Xenorhabdus sp.
KKTGLYYNRFRYYDGDIGQYITPDPIGLDGGINPYGYVHNPINWIDSLGL

SEQ ID NO: 6233 - protein, 528 aa, Xenorhabdus sp.
MARLHQKVDDAFPEITLPLLQQLKALPVKGIPATSVVQFSVMEGIKFADILRRGSEISSNTGATFVTGRECNIEPLMLVAREMSCQEETSSITLTFQYTGGDDYWPISPINLFLSPDETVADALMLALCRNLRGAILNHNGLNYSAEPFWFEPLSGISRLILPAPALTAGNWAPQMLIESLYLPHVHHFLTLSLPTAMRNRLSMTESRQFSIILKLNEALFLTEAQLADAFHLHCVPVVNLERELKITLPFTPDTARYPLPLPSEQGILRITELQLKDEPGKERGKRVQFLPISQFTHFFRGADEKTWFYALDVTRDAFERLEYALVFYDSNARLMEQPPEQEFTCRLTTFNTALPRLVAGDICLTEEDIPDGLQARNLTPASCAYPPVTDCSRYWGILSHHAANGFWLNSVSALKQLLLDYDFYADLDRNTHRNIRRMTAGIVEIQSTPGDWLIRGVPHRCVHVELILDESAYISQGELFRFSNALYQFLPFCLSEDMRIRMTIIWQSSNIRWLLSPCPLQGYRPIM

SEQ ID NO: 6234 - protein, 627 aa, Xenorhabdus sp.
GLVFTCQIGALSGTTFQVVNFSLQEGLSQLYHLSLTVVSSLNNIVLNDQLGTYASLTVTRDGKVERKVNGIVAGAIQGNTDGRQTYYIFTIRPEMWRMTLHQDSRLFQRQSVPDILKKLLKEHRVKSDSKFYEDSNLHPVREYTTQKRESAYDFWCRLAAEEGIAFWFEEEQLFFSDSHLGMTADLSLTYNNQPNTDNKDTTAWQWQYGEYLCPDEYIHKDYNWLRPSQPLQIQADLPQGGRHPIFESSGRFPWSKEGKPLGEIRLSQLNSESKLGSAQTNCVQLRPGKIFTLESHPIAAMNNRWQIVTVNHYGSQPQAAGIAGEGTTLTNNVTFIPGKNDWRPPYRYKPLADGDELATVVGPPGEEIFVNEHGAIKVHFHWNRHDEAGDSSSCWVRVVQGWNGNGFGFMAIPRIGQEVIISYLNGDIDRPIVTGCNYNGRNRSPLNLPAEKTRTTFKTHTHKGEGFNELRFDDAKGSEEVFIHAQKDMNTKVLNNRTTQVQGNHTEAVDGKQAVVVKKNRQEMVQLRSTEMVGLTKILRVGASYRINVGASMNTSVSVSQKETVGMQKRISVGQTLSISAGKVIELKCGKSTLRMDKDGKITIKGKEFRFEASGPVQISGKDIDLN

SEQ ID NO: 6235 - protein, 395 aa, Xenorhabdus sp.
MNYRMLDTEDQEYDVIAMKVGYQLLPAGKGEYLAELLPVMTLCIQDQYRRGLNVSQVLQESDLAPFKPKCDVIINGTAYAPEGKPCASFPIRLSVTEANGNTLLDKTLNISGEREFFLTDNGQWQLSDPKPFASIPLDYRYAFGGECRIEADDDKAVDVLAEEDKLTSEQLSQHPDGDQAPVAHAVWEYNPIGMGFVLPWYARAKNQPRYPAPRITHPDAPVTAQHFAQMLASQLSATELASQPQGMGIIGRAWLPRRTLAGTYDQTWLEQRHPYLPQDFDFGYWNCAPQDQQIDWPSTDISLQLTNLTPDGSLQTQLPGHRPFILFRMDDGALFPVLMNFDTLIIDTDAMTLELTFRLYFSIDLPIRVAAARFEINPKAPLITFAPEQEQHHGG

SEQ ID NO: 6236 - protein, 118 aa, Xenorhabdus sp.
MADNYIARKDTQWLIISLVPDVCKTPIGPATPPIPYPVIAKLEDSSAPVSSVRANGQPVVVFGQSFVPQTLGDEAGTATGVKSGTVGGKCHPKEHTQTVRADGKLTLRHADKFWMNGS

SEQ ID NO: 6237 - protein, 78 aa, Xenorhabdus sp.
MQESQSQNHSRSKRGVGDVLTSQGFEQGAKQELLNTVLIAPPPPGFEPFPVEPGQEENAGYGQLAVSGLKMLFGGGDY

SEQ ID NO: 6238 - protein, 817 aa, Xenorhabdus sp.
MTRWHDSDKTDFYIHYDERGRVVSTHSTEGYWADCFIYDDDARVTTYLDAEGGKTLSYYNQNNQVIREVDPLGRETRTQWRYNQKVWEIDPLGGYTTFEYNHDGALTNIVLPTGEAFYYDYDEHGQLIEATLPTGDIWQFHHDEQGSLTAVTNPQGYREKYQFGTHGELRQRLLPDGRQWHYAYDEHQRLAAIMTPDGQTTGLELDELGRLRRTTDALKQETRYRYSTAHASVSNGSLTEIELPDGVTRHFEYDSERRVIAVTDGEGRITRYSYGAFDLLTHVTRPDGTTLHFGYDRLTRFCSVTASTGETYRYERDAAGQVIREIDFTGRTIDYQYDALGRRVQVSYPDNHFLRWHYSSAGLLTRQEAWYQSGEKEELKSVSTYEYNARRQLTRAVNDDAVVEYEYNAVGLPVCERINGREVTREWNDLEQITAETIGGHTLQFGYNLMGAVNHFQFNQHTPLTLSHDALGRETVRESAEGFILASRYTTTGLLAYQSAGRATAFFRETLAQNDPHFPPQATAVNRSWQYDRAYGVSMIDDGIWGQTRYRYNQNDQIISATFNGRLPYEEQFGYDPNGNLNLHVLVDVKGVIEQVEQHQQAGRVVKRDNVTYRYDDNGRQVEKTEHHDGFRPQIWRYRWDTQNQLTHCETPDGSRWLYRYDAFGRRIRKLKVHDGKLTAANLQRWLNGKPDLTAKPDVITGYDYLWSGDRMVEEVPLYADGTPAYERSICWLYQPGVLTPSARYEKGKLHYIVSDHQGTPREILSENGKLVWASRLRTWGKAERMPLLAANDEDYHVSCNLRFVGQYEDEENGVIL

SEQ ID NO: 6239 - protein, 394 aa, Xenorhabdus sp.
MFQNNPLLAQLKQQLHSQTLRVEGLVKGTEKGFGFLEVDGQKSYFIPPPYMKKVMHGDRVSAAIHTDKEKEVAEPEELIEPFLTRFVGRVQRKENDNRLWIIPDHPLLKDSIPCRPSSQVTHNFEQGDWAVAEMRRHPLKGDRGFHAEITGYITRGDDHFAPWWVTLTRHSLEREAPSMADCQLDDGSLERIDLTSLNFVTIDSATTEDMDDALHIVKNDDGSLKLSIAIADPTAYIKTGSDLDTIAYQRSFTNYLPGFNIPMLPRELSDDLCSLRPNARRPALVCQVSILEDGQLGDDIQFFAAWVESKFKLVYDEISDWLEGKEGWKPGSDAVTEQITLLKEMCERRNNWRQQHALVFKDRPDYRFIMDEGGNVTDIVTEQRRSANRIVKNL

SEQ ID NO: 6240 - protein, 211 aa, Xenorhabdus sp.
MNRQKRVEILTRLRDNNPTPTTELVFNSPFELLISVLLSAQATDVSVNKATAKLYPVANTPQTILDLGVDGLKEYIKTIGLYNTKAENVIKTCRILLEKHQGEVPEDRAALEALPGVGRKTANVVLNTAFGWPTIAVDTHIFRVSNRTQFAPGENVDEVEKKLLKVVPDEFKVDCHHWLILHGRYTCIARKPRCGSCIIEDLCEFGDKTEL

SEQ ID NO: 6241 - protein, 150 aa, Xenorhabdus sp.
MLINAFAFGLYESLGIFIPLIVTNCIVIGRAEAYASKNSIYHSAIDGIAMGLGATFALFVLGAMREILGNGTLFDGADLLLGSWAKVLRIEIIHMDSPFLLAILPPGAFIGLGLMLAGKYIIDERLRNRSESKTRHYEMDKGCGSNITKG

SEQ ID NO: 6242 - protein, 169 aa, Xenorhabdus sp.
GGIGFDTAEYLSQSGQSSSLSSHAFSQEWGIDQTLSHRGGLQPEGARVELSPRKIYLLQRKETKVGEGLGKTTGWIHRASLSMRGITMLNNVQYLKIDDQGLHISREGEQQCLEVDNVVICAGQEPLKALYQPLQDMGKSVHLIGGADVAAELDARRAIDQGTRLAVKI

SEQ ID NO: 6243 - protein, 222 aa, Xenorhabdus sp.
MEIVTDLIYALWHQDYATLANPSLVWVIYLLLFTILFLENGVLPAAFLPGDSLLILVGVLVAQDTMDFSITLIVLTAGASLGCWVGYLQGRWLGNTKLVQGWLSHLPPHYHQRAHNLFHRHGLSALLIGRFIAFVRTLLPTLAGLAGLNNTRFQIFNWLSGFLWVIILMTLGYALGKSPLFREYEHYLMNFLVLLPVGLLLIGLIGSLTFIWRKKRTNNSTQ

SEQ ID NO: 6244 - protein, 101 aa, Xenorhabdus sp.
MPQKKNSDELRAELQSLADTLEEVLNSSGEQSKAELEKIRNKAEKMLKDARTVISDAGDKLTGQTKEIAGRADNYVRDNPWTGVGIGAAVGIVLGVLLARR

SEQ ID NO: 6245 - protein, 105 aa, Xenorhabdus sp.
MVETRVQLAAVELEEGAATLVKLLLLVGFTLLFAALGITCLLILVFLAVDPVYQMTIIAIAAGTLLLLAVLGTIWTIRKSRHLAFFNATREQLRIDRNMLENDHE

SEQ ID NO: 6246 - protein, 99 aa, Xenorhabdus sp.
MTMNKPRRLQREERKQALLQQIQLQRQSLSEHGQQWLALTRTYDHSWQTLLSFKPYFAVGSGILLLYGIRHPKKLYRWSLRMLGVWKLIDTARNIFNKR

SEQ ID NO: 6247 - protein, 135 aa, Xenorhabdus sp.
LETFMKKFEDSGLLVARILISVLFIIAGYGKLGSAYAGTQEFMEAMHVPGILLPLTILLELGGGLAVLFGLLTRTTAVFTFIFCILTALLFHYDFSDDMNQTMFLKNFSIGAGYLLLAMMGPGKFSIDRLLKKNW

SEQ ID NO: 6248 - protein, 240 aa, Xenorhabdus sp.
MIITRTANQCGKADYGWLKAQYTFSFGHYFDPNFLNYGALRVLNQEILAPQTELKPKAYPHVDILNIILQGEAEYRDSAGNYIQAHQGDCLLFSTRQDLRYSEHNLSKKKSLHRLQIWLDAKPHQAPQPVQCRRLSAQPLTLLASPASGKNSMHLRQSAWISYLMLQAGEAHNVPLQGKRAYLQSVSGNAEIYADSKSGTATHANIRCGDGVFIQDETQLNLRATSAFQGLLIDLGNQLP

SEQ ID NO: 6249 - protein, 414 aa, Xenorhabdus sp.
MEKQQKGFVQYIVQGSLVTQIIIGLIAGVLLAWVMPSAAQSTSLLGELFVGALKAVAPVLVWVLVMSSIANHKKGQKTNIRPIVVLYIMGTFLAAVVAVIGSILFPSTLILVTNEAQMSPPDNIVEVLKGVLLNVVANPIDAILKGNYVGILAWSIGLGIALRHAKESTKSVVQDLAEAVTQVVRVVIRLAPLGIFGLVASTIATTGFDTLLGYGHLLVVLLSCMIVVVLVVNPLIVYWKIRRNPYPLVFDCLRESGVTAFFTRSSAANIPVNMAMCRRMNLDEDTYSVSIPLGATINMTGAAVTITVLTLAAVNTLGISVDIPTAILLSVVSAIAACGASGIAGGSLLLIPLACSMFGISNEISMQVVAVGLIIGVLQDSAETALNSSTDVLFTAAVCQAEDAKQVPEELARR

SEQ ID NO: 6250 - protein, 39 aa, Xenorhabdus sp.
MELKFSTEHAEKPECVLRGDDMQQMGFTPNTLFHIQQMG

SEQ ID NO: 6251 - protein, 59 aa, Xenorhabdus sp.
VENDPKQGIDWVRNSGELCLAGDWLTETGLLDKSVQIAFGYGKIMLMTESDLPESYKTF

SEQ ID NO: 6252 - protein, 54 aa, Xenorhabdus sp.
MGLGITAYETKLGQYGLPENQVHIFDFEDKDVDVPPEEQAKFHYQWFESLGKGN

SEQ ID NO: 6253 - protein, 1436 aa, Xenorhabdus sp.
  unsure (1)..(1436): unsure at all Xaa locations
MALKYAEDLFPHSEVGGENSVWTPDGFKQVVQDAVDKFKSGEFPLEEWKLPPPEPNESLPTKVRDDSPSGTGNTVGKIVEQAPQGANPPHEANAAVTPETEQEKGFFDKVGEWWDETKEDVQKWGEEAKEELNAAWDNPGAAAIGAGKALWNTVPEIGELFGKGAIIVATTPAVAVEQALGYMGVAPVGISDLQQKAVDMVNADAIKMEMKSDAEKGGALIFTGASSATGIGGLLKGAAKIGAKVGPKLKKAQQKGASPKKETQQHNDDATSSTNKEGSCNGTCIKKGEPVDVATGDFLQIWPVIAIPGLLPITLTCTYXSTANFNGLFGPKWADDXXXXXXXXXXKVNFTDADGVIYDFSTPGNTVLARNQHILHYLLTGELNNELKLIDRQSQLTYHFNHAVGSIRKLSAITDRRQNAIRFIYDKHSQLIEVTRTDGFRLILSYQEQQLQTLDYLEQKKQQRLVTCHYDSQDYLSECEAFQHNHLWHEYDAQGQMIRWHDTDQTDVTLTYDDRGRVLTTSTTSGYWFDSFHYDDNARITTYIDAEGGETQYHYDNNYLVIRGVDPLGRITRRQWHHSQIVWEADAEGGITSFDYNPDGALTEVKLPTGDTFYYGYDEHGQLIESVLPTGDRWQFHYDEQGNLTALTNPLGHKEEYQYGLHGELRQRLLPDGRQWYYAYDEQQRLAAVMTPDGQTTGLQLDELGRLRQLTDALKQQTYYRYSDDHASLNGSLTDVELPDGTTQQLAYDSERRVVAVTDGEGRTTRYTYGAFDLLTQVTRPDGTILCFGYDRLTRLNSVTASTSETYRYERDAAGQIIRETDFTGRTITYQYDKLGRRIQSQYPDGQQLRWHYSAAGALIKQENWQPEEGKLVLKATTTYEYNKRYQLVKATNADAVVEYEYDKTTGLPICERINGREITREWDSLTGRPVSESVDGNTLHFGYNLSGSLNHFQLNQHAPLTFQHDALGREAVRESAQGFILASRYTATGLLAHQSAGQATQFFKETLAQNDPHFPPQATAVNRSWQYDRAHNVRVIDDSRWGQTRYRYNSNDQIQHTLFEGVRPHEERFSYDANGNLSQHLPTDARGAVAQINQCQKAGRVVQQGDIRYRYDDNGRLIEKTEQRDGFRPQIWRYRWDTQNQLTHCETPDGSRWQYKYDPFGRRLQKLKIHDGKLAAANLQLWLAGRPDVEPRSDAIMGQDYLWSGDQLIEETPIYADGTPAEGQRIRWLYEPYSLTPSARFEKYKLHYIVSDHQGTPREMLDEQGVLVWAQRLKTWGQADSFQVVSSGHADYHVNCNFRFLGQFEDDESGLYYNRYRYYLPETAQYISPDPIGLLGGLNPYGYVDNPVNFVDPFGLAKCNFAEMAKKLGYTKINERSHGQPIYMNKKASNKMKYITPDVDQHNGGVWKAADSVKNLGSRKTRSGTYDADLNRIGD

SEQ ID NO: 6254 - protein, 118 aa, Xenorhabdus sp.
MADNYLARTAGTWMIIGMLPDVCKTPIGPATPPIPYPVVAKLADSSAPEKTVRANGQPVVVFARSFVPTTLGDQPGVANGVKSGTVGGKCHPKAHTQTVRAGNKLVLRHGDEFWMNGA

SEQ ID NO: 6255 - protein, 395 aa, Xenorhabdus sp.
VMNYSMLDVDDTEHHVAVMKIGYQLMPAGQGEYVAELLPAPPLCLQDEYRGQMNVSQVLQESDLAPFKPRCDVIVNGTAYAPDNRPCSEFPVRLQVKTRQGQPLLDKTLTITGEREFIRDASGHWQLTEPKTFTTLPLDYRYAFGGECKIQADDKANKHLKERDRLTPEQRQRHPDGENAPVAHAVCETNPLGTGFITPWYANAKHLIRYPAPRIIQSDAPFTAEHFTAQLTGTLPTDTPACQPQGMGFIGRPWLPRRQLAGTYDADWLEHRHPYLPKDFDFGYWNGAPTDQQIDWPDTDIAITLSGLTPHSDLHVKLPGHRPFILLRMQNGILLPVPMRLDTLIIDSEARTLHMTCRLNFKASLPVRVAEARFEINPDAPLLKLAPLEEEKTDG

SEQ ID NO: 6256 - protein, 221 aa, Xenorhabdus sp.
SQPWPGQGWGMLAIPRIGQEVVVDFLHGDPDQPIVTGRTYHASNIPPGSLPGSKTQMAFRSKTHKGQGYNELLFEDAKGSERLDLHAQKDMNTKVLNNRDTHVLANHIETVEKNQTIKVNEHKNEMVKMTSTETIGMVYALTVGTSMNTTVGASQTEQVGSHKSIAVGNTLSINAGDVIELKCGASVLRMDSSGKITIQGSEFKFEASGPVQITGKDIDLN

SEQ ID NO: 6257 - protein, 57 aa, Xenorhabdus sp.
LMKNVRSRPVFLPVYSPWLNKIEYLWHTLHETVTRNHCCRYMWQLLSNVKKFLKKSA

SEQ ID NO: 6258 - protein, 454 aa, Xenorhabdus sp.
MNTTDTIVAQATPPGRGGVGILRISGPKAAAVAEVVLGKLPKPRYADYLPFRDVDSSVLDQGIALYFPGPNSFTGEDVLELQGHGGPVILDLLLKRILTISGVRIANPGEFSERAFLNDKLDLAQAEAIADLIDASSEQAARSAMNSLQGTFSKQVHQMVEELTNLRIYVEAAIDFPDEEIDFLSDGKIEAKLDEVIVELEQVRSQARQGSLLREGMKVVIAGRPNAGKSSLLNALAGREAAIVTDIAGTTRDVLREHIHIDGMPLHVIDTAGLREASDEVERIGIERAWQEIEQADRVLFMVDSTTTDAIEPEKIWPEFMAKLPESLPVTIIRNKTDMTGEASGISEINGYTLIRLSALADQGINLLRDHLKEAMGFNSNTEGGFLARRRHLQALNTAAEHLQEGHQQLVFARSGELLAEELRLAQQALTEITGEFTSDDLLGRIFSSFCIGK

SEQ ID NO: 6259 - protein, 103 aa, Xenorhabdus sp.
SSPELAAYELIDSIGKNISFEHAAELFQGLVNLSPRKVQSLLLRSHAVQTNRIFLFLSHYYGHQWVKRLEESQIELGSGKRQVVAQGRYDERYKITVPATFDV

SEQ ID NO: 6260 - protein, 310 aa, Xenorhabdus sp.
FYQQVKLLIRVLPIVAKEKVFALKGGTAINLFVREFPRLSVDIDLAYLSSEPRDEALLNSRAALQRITDDINTQPDVKAVFQDNKPDELRIVVFNHVATVKVEVSPVALGTLHKPEERYVTEFVEDEFGYAEIQVVSLPDLYGGKICAAMDRQHPRDLFDMGMLLNEEGISREIFVGFLTYALSHPRPINELMSPNWQKLDEKFYNEFEGMTLKPVELVELETTRLKMLAALQAHFTEKDRDFLLSFKKGKPEWSLFDEPSAAELPVIRWKLINIEKLMKNEGKHLEQLTKLEKSVNSWLKKGVYKQIRK

SEQ ID NO: 6261 - protein, 114 aa, Xenorhabdus sp.
IDDPRSDINKKHELMDVIFLAFSAVLCGASGWKSIQEFGELQIEWLKQYTSFTHGIPRRHCVANIIKMIDQDALVEAFYGWINQRRVTAGKSLIAIDGKTLRGTAKDMFRAHGP

SEQ ID NO: 6262 - protein, 730 aa, Xenorhabdus sp.
LLPAQSAGDMPPALKDEFMQRLDRQLVWMISPGTEENEAPAEYWQEQLEKTPFLAHVKGPINADHQQEWGTFYYKHRNAMLDPMTRDRLQSEGTQQANWILSQVYSAFSGVSGQELSNDPLMLVRGSQLALQQTSSRLRLQHGWLTAKDGTGRIWYLLHAELNGSSFDMQQAHQAVTELGKLEQSLKNRFPDAKVISRGTLFYSDYASQQAKHDISTLGSATVLGVLLLIYGVFRSLKPLLLCVLSISMGALAGTVVTLGIFGELHFMTLVMSISIIGISADYAIYYLTERMVHGQEVTPWQSMRKVLSALLMALATTVIAYLIMMFAPFPGLRQLAVFAAAGLTASCLTVICWYPILAKNLPVRPIPAMIMLMRWLALWRRNKLFCIGLPVTLTLFALIGISRLHINDDIAQLQALPQDIHQQEKHIAELTGQRSDQKWFVVYGDNAEQTLQHLENFIPLLELEKQRGTFENYQRLPLSSLAQQQKDLKLLKASVPNIMARLTETGLPVKQPDLHPMTVMPNDWLNSVISEGWRLMWITLPSGQSGVLLPVTGVKDSVLMRQLAEKQTGISWVDRKLAFDEMFQFYRTILGWLLAGSIVLIGISYVIRLGLRRGAVSILPSLLSLGCALAVLGFSGYSLNLFSILALVLVLGIGINYTLFFSNPRGTPLTSLLAITVAMCTSLLTLGMLVFSNTQAISSFGIVLCSGIFTAFLLSPLAMPERPKRNKKA

SEQ ID NO: 6263 - protein, 132 aa, Xenorhabdus sp.
VKGKQQSLIVLLNASEDQLSLAGLSSLGIRLFKLTYDHNGIHAEQSLVLPEIPPASQVLADIMLSYWPVSSWLPLLPEDWTLQDTNNIRQLHDNKGHLITEIQYDTQNGRRYPIHVRQFIFGYDIAIQHLEE

SEQ ID NO: 6264 - protein, 387 aa, Xenorhabdus sp.
IYISAVGMLNALGNNVDDIAQNLVSGHAPGMYARSGWLQPDKTCCLGGVDAELPAIPPHLHQHNSRNNQLLLAALMQIKPQVDKAIAQYGRERVAVIMGTSTSGLNEGDTHVNRTVNQQPDESYHYYQQELGDPSRFIANYLELTGPAFTISTACSSSSRAIISGQRLIEMGMVDVAIVGGADTLSRMPINGFNSLEALSETLCEPFCQDRQGITIGEASTLLLLTREPHSVALLGTGESSDAWHMSAPHPEGKGATEAINMALSNAGLSTQEIGYINLHGTGTKLNDQMESLIINQLFGESTPCSSTKHLTGHTLGAAGACEAGLCWLLLSRKLPLPAQDFSRSGIDTSLASCGLLAQSVLLEKPVIMSNSFAFGGNNTSLILGAV

SEQ ID NO: 6265 - protein, 142 aa, Xenorhabdus sp.
MVLLEKVISVSSESVHCQVTVNHEGVLAPFLNAEQNLPNWFAIEMMAQTIGVWSGWHRKERQEEDSSLGMLLGGRAVRSQVPAFTYGSILDIRMNLLLQDEKFGSFEGEVSCNGIVLVTGRLNTYQPEKEELKQLFKRDGAV

SEQ ID NO: 6266 - protein, 240 aa, Xenorhabdus sp.
SVLVTGASKGIGRAIACQLAADGFTTIVHYHRDAKGAEATLEQIQANGGNGRILSFDISDRDACRTTLEKDIEVHGAYYGIVCNAGIAKDGAFPALDGSDWDSVIHTNLDGFYNVIHPCMMPMIGLRQGGRIITLSSVSGLMGNRGQVNYSAAKAGIIGATKALAIELAKRKITVNCIAPGLIDTDMIQIEEIALKEAMNMIPMKRMGQANEVAGLASYLMSDIAGYVTRQVISVNGGML

SEQ ID NO: 6267 - protein, 407 aa, Xenorhabdus sp.
RRVVITGMGGITALGHDWQSVSSGLKSGVNAVQQMPEWAEYDGLNTHLGAPVTDFTLPDHYTRKRIRSMGRVSLMSTRATELALEMAGLIGYPILTNGETGIAYGSSTGSTKPVSEFATMLTEKHTNNITGTTYVQMMPHTTAVNTGLFFGLRGRVIPTSSACTSGSQAIGYAWEAIRNGYQTVMVAGGAEELCPSEAAVFDTLFATSQKNSEPKTTPSPFDANRDGLVIGEGAGTLILEELEHARARGAKIYGEIIGFATNCDASHITQPKSETMQICMEMALKSAGLQPADIGYISAHGTATERGDVAESQATFNIFGNRTPISSLKSYFGHTLGACGALEAWLSIEMMNEGWFAPTINLNEVDPACGELDYIMHQPRTIQTEFIQSNNFAFGGINTSLVIKRWQ

SEQ ID NO: 6268 - protein, 399 aa, Xenorhabdus sp.
VETTVVKLLRKNDSAFVPVAGLTVFAIASGYLMSLIPLSMAGFSIDTGYASWLASSYYVGLLIGSLMIEPVIAKIGHRFSFVSFLLLLAATVMVLPFFPNKEMWLLIRCIAGVAVAGVFVVVESWLLIGDSPKERAKRLGLYMTSLYGGTTLGQLGIGFIGTQGMIPFAVILALLLLATLPPLFLRQGQPPALQHQRLSLKKITRFSKPAIVGCLTSGIVMGTIYGLMPLSLSQSKFNTEQVCVLMAAIILGGMAIQPIISKLSIIVSKTLLLAMASLLGVFAVGMTYLSESYIVMIVALALLGMSSFALYPLAITLACDKLDSSYIVAATQVMLLSYSIGSAMGPLGAGNFMFQHHTVQHTGAMQNNGLMDFFFLVLLTTAVYMLLAAICRKDRVLAN

SEQ ID NO: 6269 - protein, 152 aa, Xenorhabdus sp.
ILMQIQQATEHDFPTLLQIWEASVRATHDFLPLGMIDELRPLVNEYLPNLNVYKIVNDQNNVAGFLSVEQNRVEMLFVSPEMRGKGVGKMLLEFAISELKINELDVNEQNQQGVGFYQYMGFKTFSRSETDGQGNPFPLLHMKLQGGIPLCL

SEQ ID NO: 6270 - protein, 133 aa, Xenorhabdus sp.
VMQIQAALPEELQQQWPSIQSVIEVVSERSTKGQPAHRDSRWYVSSLPLDAETAAKAIRRHWAVENELHWVLDVAFREDNISLKDPDGAAQMALFNRIALNVIKQNTSIKDSQAAKRRRATWSGEFRSQLIFD

SEQ ID NO: 6271 - protein, 472 aa, Xenorhabdus sp.
IKKEDTRELYYQGASRVAEIQRESGAVTRLVQAGRAPAASVTADGVHLLGTDGPGSVLLSRHNDRTSRFRYTPYGQQAAADSDPALPGYNGERQDPLGGGYHLGNGYRTYNPVLMRFTAPDSLSPFGAGGLNPYAYCLGDPINRTDPSGHISVGSILGIALGLFGMAAELAAVIPTGGASLTLSGAVLAGAGFLGAATGLASSLTEESNPQASSILGWVSMGAGVVSMVPLFGKLARGMKAMVTQVGRSFNRSPAGPVMEIIGPTIEESPRGLNMAAPLPRPLNALDAFDRTVSAGWIQEVQTHVQTPFITHSLELSLPQQGVPRIIGNTENPFLQLLSFDTSLPVSRMNNAVPNSVIHVDITIPVARTLYAPFINDRTGRAGVGFINYIRHDIGVRQILAAENRIRGTQHMVEYQQSVISLMEENWNNVRLSGNPRGLMQAIIQHQIPQIWRQFCTSGLDVFAFYNQHIFI

SEQ ID NO: 6272 - protein, 553 aa, Xenorhabdus sp.
SVLDLPRQLKNKLLRSLARVDADTTLGDIFNVDYTAEGRIISRNGQPVDGVAVIQEMLEVISGFSSDQLKALIDPQTLKDYIKEHSAADTDALNSFLENHGLKTKAPVDDQPKQAEEQPRDNVQSERTAGFNSFNLPNLFATLFSQKKQQDMQNLVTSLKQNLTADLLNMQDKTFDFLRNSGHLQGDGDIHVSLGNYNFNWGGDGKDMGAYLGDNNNFWGGRGDDAFYSLGTSNVFTGGEGNDMGVLMGRENMMFGGAGDDVAVLAGRINYAYMGKGNDQVFAFGEGGVIEGGEGRDYIVASGNFNRIDSGEGQDYVVAIGNNNQVELAEGNDFATVFGNENRIEGNEGNDSIKLMGYHALINSGEGNDHLIADVVSKFSQLNGGDGDDLLVLGGYQNRFTGGTGVNSFVVSGDVIDNIVEDIKSSDKIIFNNLNWQNLWFQRCGYDLILLTARHVTDTSAQGQFEATGSVTFNDYFNGNQADIITRIGDKDARGEREFTALSTHAVDSLVQAMSGFAPTVGDSGFMDSLDNQTKSSIVTAWSDTTIGKDRLI

SEQ ID NO: 6273 - protein, 193 aa, Xenorhabdus sp.
LRNKMSNEASPAFDLIITALKEEKVIAYPTEAVFGLGCDPDSEKAVNKLLLLKNRPKEKGLILIADSYERLCPYIDDNQLDNEQKRTIFSCWPGPVTWVIPAKSGTPKWLTGRFSTLAVRVTDHPLVRELCALYGKPLVSTSANLSGLEPCRSSEEVCRQFGNDFPVLEGEVGGRKNPSEIRDALTGKLYRQG

SEQ ID NO: 6274 - protein, 162 aa, Xenorhabdus sp.
GAELVIRNGAYGPFYACSNYPSCSYVRSLKISSDGHVIKELEGQICSKCGSTLVLRQGRYGIFIGCSNYPECNHIELIDKPDDSSVNCPQCQKGKLFQRKSRFGKTFYACNRYPECQLTLNNKPVQGECELCHYPLLVEKKTAQGIKLFCASKLCNKQQSIE

SEQ ID NO: 6275 - protein, 109 aa, Xenorhabdus sp.
MSVLQVLHYPDERLCTIAKPVEKVDAEIQRIIDDMFETMYAEEGIGLAATQVDIHQRIVVIDVSENRDQRLVLINPELVTESGETGIEEGCLSVLEQRAICATIRASQN

SEQ ID NO: 6276 - protein, 70 aa, Xenorhabdus sp.
VPRFEQVKIKALNYHGQPFELEADGLLAICIQHEMDHLLGKLFVDYLSPLKRQRIRQKVEKIDRLRAKAK

SEQ ID NO: 6277 - protein, 315 aa, Xenorhabdus sp.
VSDSLRIIFAGTPDFAAHHLAALLKSQHQIVGVLTQPDKPAGRGKKLTPSPVKVLAEEYHLPVFQPKTLRTEESQQWVMEQQADIMVVVAYGLILPQAVLDMPPLGCLNVHGSLLPHWRGAAPIQRAIWAGDKETGVTIMQMDAGLDTGDMLLKATCPITNEDTTASLYDKLADIGSDALLNTLSLITSGNSQPESQNNILATYAEKLSKDEARMDWNLSAIQLERCVRAFNPWPISYFFIDEQPIKVWKAHAIGGKSNQIPGTILHADKKGIQVATTDGILNITQLQPPGKKAMSAADLLNSKREWFTPGNKIN

SEQ ID NO: 6278 - protein, 428 aa, Xenorhabdus sp.
MKKTYNLRSIAAKAISQVLEQGQSLSTVIPELQQKVSDKDKALLQELCFGVMRVLPQLEWLIAQLMAKPLKGKQRIFHYLIMVGMYQLTYTRIPAHAAIAETVNGTISLKRPQLKGLINGVLRQFQRQQEELVEQSNDVGHYLHPKWLLTRIQKAYPHNWQHIVGANNQKPPMWLRVNQIHHSTNQYLSLLQKANIAAELDTDHPNAIRLLNPCPVNILPGFDKGWVTIQDRSAQGCAELLMPCDGEEILDLCAAPGGKTTHILEMAPNAKVLAVDIDEQRIKRVEENLQRLNLNAVIKTGDGRFPHKWADGEQFNRILLDAPCSATGVIRRHPDIKWLRRNEDIDQLVTLQSEILDAIWPYLKKSGTLVYATCSILPDENSEQVKAFLKRNPDAKLSGTGTQETPGIQITPEITGGDGFFYARLTKQ

SEQ ID NO: 6279 - protein, 458 aa, Xenorhabdus sp.
MKIIILGAGQVGGTLAENLVDENNDITVVDTDTDRLRQLQDKFDLRVVNGHGSHPRVLREAGAEDADMLVAVTNSDETNMIACQIAYSLFNTPNKVARIRSSEYIRESEKLFKPGDIPIDYLISPEQLVIDYIYKLIQYPGALQVVNFSEGRVSIVAVKAYYGGSLVGNALSSLREHMPHIDSKVAAIFRQDRPIRPQGSTVIEAGDEVFFVAASQHIRAVMSELQRLEKPYKRIMIVGGGNVGAGLALRLEKDYSVKLIEHNQERATELAELLHDTIVFYGDASDQELLAEEHIEQVDVFIALTNDDEANIMSAMLAKRMGAKKAMVLIQRSAYVDLVQGGVIDIAISPQQATVSALLGHVRKADIVSVFSLRRGVAEAIEAIAHGDEHTSKVVGRKIGDIKLPSGTTIGAIVRGEEVIIANDYSIIQQGDHVIMFITDKKFVPEVEKLFQPSPFFL

SEQ ID NO: 6280 - protein, 89 aa, Xenorhabdus sp.
MNQAIHFPDREEWNGQENKVIFPAMVNGLLVQCLISADELTRRYGNDFHPLELFRQHRWDLEEEFEEIILRGQDDQFGCYSLPSDMSAR

SEQ ID NO: 6281 - protein, 272 aa, Xenorhabdus sp.
  unsure (1)..(272): unsure at all Xaa locations
MDKFAVFGNPIAHSKSPYIHQLFAKQTGIEHQYGRILAPLEHFEQTLKQFFEQGGLGANITVPFKERAYEYAHQLSERAKHCGAVNTFKLIENNQLLGDNTDGVGLLADXQRLNFISKGQHILIIGAGGAAKGVISPLLDFGCTVTITNRTFARAQGIVNIFSSFGHIQAVEMKSLLTPYFDLIINATASGLDGSVPEISPSIFRNGGACYDMYYQKGLTPFLSFAKESGASFLADGLGMLVGQAAHAFELWHGVLPKVEPVLAALREELRL

SEQ ID NO: 6282 - protein, 354 aa, Xenorhabdus sp.
EIWLRMKMVSHLSVAKAVSIIEHLLQVKNITHAVMKDCGLSPTQCVQFLKANPSVLLSSLNWLEQSENHLLTFSDPEYPSLLKQIYSPPLILFVSGKVSTLSEKQVAIVGSRSASFYGEKWGRVFAGGLAENGIVITSGLAVGIDGICHQAAIDAGGKTVAVLGSGLENIYPNRHRTLACCIKENGVLVSEFFPDTPPKAKNFPRRNRIISGLSLAILIVEAHQNSGSLITARCALEQGRDIFALPGPLGRPSSDGNHWLIKQGAYLATSVIDIMEHINANFQWINLEEGNEKQFEQTELPFAEVLVNVSDEVTPVDIIAQRSSLPITEVMTQLLELELMGKVAVVAGGYVRVN

SEQ ID NO: 6283 - protein, 137 aa, Xenorhabdus sp.
MYRIGQLAKLANVTPDTVRFYEKQGLMEHEERTESGYRLYTKQDLQRLRFIRYAKQLGFTLETIVELLSIRVDPEHHTCQESKRIVDTRLQEIEEKLLEMQKMRDSLKMLSDACCGSAHISTYCSILEILEEGATKK

SEQ ID NO: 6284 - protein, 130 aa, Xenorhabdus sp.
MRHRKSGRQLNRNSSHRQAMFRNMAGSLVRHEIIKTTLPKAKELRRVVEPLITLAKTDNVANRRLAFARTRDNEIVAKLFNELGPRFASRAGGYTRILKCGFRAGDNAPMAYIELVDRAAESQTEAAAAE

SEQ ID NO: 6285 - protein, 244 aa, Xenorhabdus sp.
KRAGGESSGQNEVILTLNKSGMGPVTAADIIHDGDVEIVKPQHVICHLTDESASISMRIKVQRGRGYVPASARIHSEEDERPIGRLLVDACYSPVERIAYNVEAARVEQRTDLDKLVIEMETNGTIDPEEAIRRAATILAEQLEAFVDLRDVRQPEVKEEKPEFDPILLRPVDDLELTVRSANCLKAEAIHYIGDLVQRTEVELLKTPNLGKKSLTEIKDVLASRGLSLGMRLENWPPASIADE

SEQ ID NO: 6286 - protein, 94 aa, Xenorhabdus sp.
KNQELVSDEIATHIDSGKYVTKLALDWEKRIQFMLSDDGSYKRIKFSETLRDQNDDIDREDVAQRFDADFTLMTGELSALIKNTIDALGGEAER

SEQ ID NO: 6287 - protein, 101 aa, Xenorhabdus sp.
VGLFKLLQSDFPHRNTLLEKYQKSGIENSKVILENWLNNQHERGVLNNFNYNTFSDLAISMVISEPLRKMALGQIPPLPETDVSPQITAIIKLISTESDKK

SEQ ID NO: 6288 - protein, 56 aa, Xenorhabdus sp.
MEKLIKIVLVGTVLATLTACTGRVENKKNNCSYDYLLHPAVSISKIIGGCGPAADQ

SEQ ID NO: 6289 - protein, 375 aa, Xenorhabdus sp.
MAIPAGFITGTANAAEIYNKDGNKIDLYGKAEVQRYFAKSKSKEAGDNSFGRIGIRGTTQLTDSISGYGRWEFNMGASRTEVESSQFARTRLAFVGFKLGEYGTLDYGRNFGVVYDANALTDMMSVFGGDSMAATENFMMGRATGLLTYRNTDFFGLVNGLNFALQYQAKNDGGTLNTRNDIARQNGDGVGLSSSYNLGHGFTVAASYGNSNRTTDQKNGTASAKVLAKGNKAEAWLVSAKYDKNNVYLAAMYGEARNLTRFGSSVDNRVMFANKTENIELTAQYQFDFGLRPGIAYVYSKGKDLGKDLGENNLLTNKNSEDLVKYISVGASYNFNKNLGTYAEYQINLLKDNAFTKATKLNTDNVMGVGLVYRF

SEQ ID NO: 6290 - protein, 639 aa, Xenorhabdus sp.
MLRPKQKELLNYLMEQNNPTLAVKLSQVLNVSIRTVKNYVLEINESYRSKIIISGRSGYVLSSDANLKLKQKLRDFPKTYQERAGYLIKSILLFRKSNKIYDLSAELYISDSTLKSVIYKMNGSFEKFNVRFLCKNNRLEIIGSELDLRELAYHTIMEQADYRTLDLKKLVILFGEQQVEIISDIIAQVFNNRGCSVYELSYTNLVLRFLILLKRLSYGKYLKNKLAFIEENQGIKSITEELCDRLQYTFNIPIAENERHFCYTLLKIDTNITQTGDSKLIESDKAGLYQLARQVAESVAEHYLINLATDDFISLFCLHISGLKTRLQHNVHTRNPMLDMIKKECRTIFDIAVFISLQLNEFFGKKLNEDEISFLALHVGAEFERQKTKGHKVQTVLLCPGYKGIENKIYHQLLRDFGDEINIIKIISQPSELECFEFELLITTINIPSSHKYETVCISPFQMRDRRAQLLGKIDIANANRKRRALQRNFDLFFEPGLFWFEPGFQQRDELIDVLCQTMFAKGYTEGDFVRYVYQRESASSTAFGILALPHSAKMDAIKTGVAVAISPKGILWGESERVHVVFLIAINRIDRACFAECYDALLDVFSQDEMINQLNKITCFEQFRSIFIRSGDNVDVEK

SEQ ID NO: 6291 - protein, 85 aa, Xenorhabdus sp.
VAANDAVMLNVIRSNTAQYVGRIAANNSVYKSATVSSLRHAKDISWVSLALGTGAITLFQFPVGVPLVISAMVTRFIIRCLPIIG

SEQ ID NO: 6292 - protein, 66 aa, Xenorhabdus sp.
VAIVALSSTAFAADGTQQSAGYLDALLKQIDVGPIVTGVVSVAAIIMGVSVTVMGLKKVGKMINAF

SEQ ID NO: 6293 - protein, 92 aa, Xenorhabdus sp.
VKIEQKTRTNKNTGEITPYYTQRVIAHMGPRSMSETVITLSEPNPLPEGKYLISGSSLYPGKPFGDNPPRLEFNQWNVSYVPMETVKHLIKL

SEQ ID NO: 6294 - protein, 374 aa, Xenorhabdus sp.
VIIDYLAFSAPLSCMKDVHTFQEKGHEWRKYEFLPSYRHYQHSQFTESVLGRDYEALPDSGEVFSSSIEDINRKAERYNRELLSCLHSRLRRFIAAVFGLFVGPARGAGGFAYQDSAILYSEDGGYEHFGMIYWGGNNGTFYVQIGGKGCTHVMSGTTPEKIYKWLKHLDITSLKRLDLATDDYDGVFTCHHALSAYKDDAFYGGMGPKPKLGNAHEIDATGCYTKEIVTVGSRQSRVYWRVYNKALEQKVSGTWYRSEAELKGVPIEVLLNTQGTYTGLCPYAASINPTKPAPIPILLGRKAVDAIESKVKWLRKQASSSIAKLIHFFEGDTQAVLSMIVRDDHISDLNLKLDLPPIYQTLINEKLGVSQCPF

SEQ ID NO: 6295 - protein, 63 aa, Xenorhabdus sp.
MKIIYFDYIAGFGINALVADEWDFYPSVDELMYECTSLYGNQIVFVSTATTSGNFTGYQESLK

SEQ ID NO: 6296 - protein, 155 aa, Xenorhabdus sp.
MRIRCSARLLIISPSNRVLLFNFVHNEGALAGRSYWATPGGGVKKGESFEQAAIRELREETGIRKDNVGQCVAQRTFEMILPSGEAVLAKEHFYIIKFDKEDINTIEWTENEKSVIKHHHWWGIDQLTNSVETIYPNDIPAIFFSALKNNIHQKS

SEQ ID NO: 6297 - protein, 305 aa, Xenorhabdus sp.
VEYMMAEKQLEFDEVIETLPLHSWSENVPHSVQQNALISLELGKVLYLPELSFSLMSEEQQLLREDAVKAGRKNISYRPDEHKIAGVALRSDEQLVHVLMQRYYEHCQQLIEHLLPIYTKVLHTPVNSLRVHPVTAWKTGNSWRKDDSRLHVDAFPSRPIQGQRILRIFTNINPAGEPRVWRVGDKFPQIADQFLPATRSYSRINSWLQHKLGITKSRRTHYDHLMLGLHDAMKANQQYQQQGAQLEVQFPAGSTWICYSDQTPHAAMSGQFMLEQTYLLPISKMASPENSPLKVLENKLDKALL

SEQ ID NO: 6298 - protein, 215 aa, Xenorhabdus sp.
VQHIPATQEGVWSYRGGFIDLTLQFTACAVRLAKGHMLPSGVAPETQAAQSLLWQAVVFWAALFYHLPLLRQLEGELDDGHPWLPGLWVPARRFRFRFHASLSELPVSHKTLLAARLLPEEAVTWLSLVPGAWQCLMLHLDGSPSSVPLTDLLLQSAAEQVKSPLLKPVESAEARAATAHPSPDPVTPLVTPMTVPAPDTRDDTRTLLSLFQTAE

SEQ ID NO: 6299 - protein, 227 aa, Xenorhabdus sp.
MASHPDYQKDFISLFKQTALSRNRYRVFQDFCNCAMAAIHNKYCFSEELEQFYLKTINKYEREDIDRIVELFSMTVLALSEEPGDFLGSVFMQLELGNKELQQFFTPWSVARVMAQLQLNEVSDLLQTRPFVTFHEPCCGAACMMLAAAEVLREQGYDPLSSMWVSAIDIDPLAAVMAYIQLSLTGIPAAVTIGDVLNDPGSQRTRYTPAHYLGNWSQRLQAYEHAA

SEQ ID NO: 6300 - protein, 307 aa, Xenorhabdus sp.
MAEWVTNQLEVTGKSVCLDVMQQWVCGEEVPRYRQAVLQSLRLFLAGCAGILKPTKPLTYTPYPELIRGTAAPTAQNLAFEQWLALLQDNVLLTTENMKRIDSIYRQSGLSLLRWETIPASARDMIARLLTRQYTDWFGVVGWSDNLDMGVCWEKLSVYPTSAQPCDMLMIRPTRLAPEINGNSGLLKGMASTVQFYDEHYGLEWPFGHHVRWERRHVSSLTVRFDTPWVPPSAELMGGLSSVFDCEIRHWYSEPSGSLKGYDCYDQGEHVDSHNGQVGQENRPALYLVNGDKTETALALPAMAVGQ

SEQ ID NO: 6301 - protein, 136 aa, Xenorhabdus sp.
VCETASITEAVQRLKVIHLLGDWPIPEISSGQYRRAFFPLTVMIYDAKDNSVLGGRFYDEIVWAQPVTLTSERLSLERKQQQLCQAATVELSWQDPQAAHVLWQEANLLSLHMISPDYHYHHEVQDILRHSATVSV

SEQ ID NO: 6302 - protein, 67 aa, Xenorhabdus sp.
MEKISLSEYVKQNGQAKTADLIGVHQTAISKALRAGRKIFLIRQEDGSYKAEECRPFPSQKPPESGK

SEQ ID NO: 6303 - protein, 268 aa, Xenorhabdus sp.
MSVPAFGLGTFRLKDDVVIASVKNALELGYRAIDTAQIYENEAAVGQAIEESGIAREDIYITTKIWTENLSKEKVISSLKESLVKLRTNYVDLALIHWPSPNNVVSVAETMNALLEAKEMGLTREIGVSNFTIDLMQQAIDAVGAEHIATNQIELSPYLQNRDVTAWAQEHGIHITSYMTLAYGKAIHDEVIGRIAEKHQSTPAQVILSWAMSLGYSVIPSSTKKENLASNLKSTALKLDADDMAAIATLECNERIVNPEGLAPQWDN

SEQ ID NO: 6304 - protein, 183 aa, Xenorhabdus sp.
MDIKTLCKLYQSKEDIKYLFFWGHKTHHTELITKSCLSQWYPAKFVVDGVSYISAEHYMMAGKARLFNDFATMEKIINAKNPGAAKSYGREVRGFNQSICNEHRLKIVIDGNIAKFSQNPAMEAFLLRTGDKVLVEASPVDRIWGIGMAEDNPDIYNPLAWNGLSLLGFALMAVREKLKIEGE

SEQ ID NO: 6305 - protein, 186 aa, Xenorhabdus sp.
KKVIIIHGYTASPSSNWFPWLKEVLTEQGAEVIVPEMPESLSPTPEAWARKLMEIAPNVDDNTIFIGHSLGCVTLLRHLEVIKDTTDKIGGYILVAGCDSAQSTMPELDCFTVQPLNYVFLREVTAHRVSIISSNDEIVSPESSHALANSLQTEIINIENAGHFLDREGFIRLLPVYDALKTMVSG

SEQ ID NO: 6306 - protein, 383 aa, Xenorhabdus sp.
MIISASTDYRAAAQDKLPPFLFHYIDGGAYAEHTLRRNTEDLSHIELRQRVLKDMSELNLETCLFGEKISMPVALAPVGLSGMYARRGEVQAARAATKKGIPFTLSTVSVCPIEEVASAIERPIWFQLYVLKDRGFMRNVLERAKEAGVKNLVFTADMPVPGARYRDAHSGMSGPNAAIRRFLQAITHPRWAWDVGVMGKPHDLGNISVYRGTPTRLEDYIGWIGSNFDPSISWKDLEWIRDFWQGPMIIKGILDPEDAKDAVRFGADGIVVSNHGGRQLDGVLSSARALPAIADAVKNDITILADSGIRTGLDVVRMLALGADSVLLGRAFAYALAAAGETGVSNLLELIDKEMRVAMTLTGAKSVNDINSDLLVNNLRPLF

SEQ ID NO: 6307 - protein, 154 aa, Xenorhabdus sp.
  unsure (1)..(154): unsure at all Xaa locations
MVIGCSQAFAHDFSYKSDIPADNKTPEEYLKKREGLGTNNWQVDKLAQDNALVEKREEEADKYARKDHSKAHLGFSYDWDNQKLKFPHDWDNQKLKFLHDGDNQKLKFPHHDKDWDRNRASRRXCYRETRQKLEQKWGNGYSNMEIEDACRRAY

SEQ ID NO: 6308 - protein, 301 aa, Xenorhabdus sp.
MAALGPIVLGLAVGWLSGKYGLIKREYSQAFADFVVKIALPFALFLAAAKAPPSVLLNINYLLTLAVGLIASYIIGFFAGKILFRHDKKDSAMQALSVSFPDMAYCGPPVLLATVGSSGLIAMILGNLIYTIIIIPFTLLMISDRKKNSSVLKSVGKDIAQPLVFLPILGALLAIFGVKLPEILQNSVDELGKTAGGVALFFLGLLLSGIKLKISVEIVFNVFVKNFVQAALVLGTGLALGLQSDMLKSAFIIGFLPTATAVPALAITNKAYTDTSAETVLLSTLAALISIIGGITIVEML

SEQ ID NO: 6309 - protein, 168 aa, Xenorhabdus sp.
MTQLYMFYLGGNAGKSNIEVHDVQFVAINKVEEAYPVLRDVWFGDKDKLHLDGYMPVRWADGYDISLSKNEYAGDLRLYFVNVGGYQNNSLAEAHEYGFFVGRTAEEAKEKAKKYLLTGYDQLHKDNLKDVDECLLLGQVSGYYIHLTENPNGLPDKPEWQGYRPIGI

SEQ ID NO: 6310 - protein, 251 aa, Xenorhabdus sp.
VDAFTEKDFSGNPAAVVLLDEWLSDEVLIAIAAEINLSETAFLVGDHLRWFTPRVEVNLCGHATLATAFVLVEKCSYQNKLITFKTRSGDLHMTHQDGVFTLDFPAADCQEEATLLPVIQDALGQKIKAVFASHDRYICVLDSAEQVRHIQPDFDKVASLPLPGLAITAPGDSSTDFVSRHFAPAKGVNEDPVTGSTHCVLAPFWGKRLNKSILRARQLSERGGDILCEVQGKRVYLTGKAKLFSYGQIVL

SEQ ID NO: 6311 - protein, 270 aa, Xenorhabdus sp.
GRLSQRFLKKRAKIAERNLLLCFPDMSQEERDKWLVKNFESVGMGLLETGMAWFWPDWRVKRWFKVTGQENIQKAQTTGQGIIIIGIHFLTLELGARIFGILNPGIGVYRPNDNPVLDWLQTWGRLRSNKYMLDRKDLKGMIRCLKNGEIVWYAPDHDYGPRKSVFAPLFAVEHAATTTGTSILVRLSNPVLLPFTPRRLPDGKGYELIIQPAVENFPEKDETEAAAFMNKIIEQEIMQAPEQYMWLHRRFKTRPEGMPSLYGDNNDNIH

SEQ ID NO: 6312 - protein, 221 aa, Xenorhabdus sp.
MDVKELIARRVALELNDGDIVNLGIGLPTQVANYLPEGVHITLQSENGFLGLGPVTQIDKDLVNAGGQPCGVLPGASMFDSAFSFALIRGGHIDVSVLGGLQVDQNANLANWMIPGKRITGMGGAMDLVTGARKVIIAMEHCAKEGSAKILRECTMPLTAVNAVDTLITELAVFRFENNQMILFEYAPGIDIDTIKMKTEAEFIISPNVKPMFSGVIGDGL

SEQ ID NO: 6313 - protein, 398 aa, Xenorhabdus sp.
VDLAKMWGDGFWNLLAFGMQMALIIVTGHALASSDPVKRLLRLTASLAKNPAQGVMLVTFFGSVACVINWGFGLVVGAMFAREVARRIPGSDYPLLIACAYIGFLTWGGGFSGSMPLLAATPGNPVEHISGLIPISQTLFTSYNIFITLSLIVVMPFVTRMMMPKKEDIVIIDPVLLEEEPDYQKKLPENAPLSERMEESRIIAGLIGILGFTYLGIYFFSNGFNITINTVNMIFLLTGLLLHRTPMAYMRAISAAAKSTAGILVQFPFYAGIQLMMEGSGLGRLITEFFISVANKDTFPMMTFLSSALINFAVPSGGGHWVIQGPFVMSAAEALGADLGKSVMAIAYGEQWMNMAQPFWALPALAIAGLGVRDIMGYCITALLFSGLIFIIGLTMFY

SEQ ID NO: 6314 - protein, 162 aa, Xenorhabdus sp.
TKSSLIYTAPQEFFFTQIKVAMFGAMVISFPVIASQLYKFVAPGLYKNERAAFLPFLIASPILFLIGAALVYFFFTPMVMWFFLAMQQLPEDGEVAISLMPKVSEYLSLIMTLVLSFGLVFQLPVVTTLLARVGLLTRDWLREKRKFAIVMAFVVAAVLTPP

SEQ ID NO: 6315 - protein, 258 aa, Xenorhabdus sp.
RFILEFLFFGLINARSCLFAGFFFLALFLVPAKGILDIPRYDVLLVFAVAFQALLIRFKLETWDEFKAICVFHLVGFIMELFKTSASISSWQYPDAAFTKLWGVPLFTGFMYAAVGSFIIQSWRFFKVRIEHYPPYWMATLVALAIYINFFSHHYIDDYRWYLTAFIFGLYARGTIFYTPLDKERKMPLLLSFILIGFFIWLAENFGTFFGVWQYPNQLGAWSVVHAGKWGAWSLLVVVTFTIVVHLKHIKSSVAIAR

SEQ ID NO: 6316 - protein, 592 aa, Xenorhabdus sp.
MFDGGSASDILPEPQIPGMQWTIDPSTKLCTLGDRIVGWDPDSRDITLWPVDPTLAHPGLPSKTITAWKNVLPADTVLFGITPLVPLELPTGVQGGEDGPGTIPWMRQRIKKVVYLMLENRSLDHMFGDLYTVDKVGKFIGPDKPFDGASNTNWNADKNGHRYYQTKFSVHSVDYPRSDPDHTYSGIIQQLFDGAEPGAGRIPEMKGFVKSYSFSGKSPNEVMDYYDPSMLEPLSLLAKQYAVSDTWFCSLPGPIDPNRAFSLTGSSFCKTENFDSGEIYISWPKSPRRPSVWDVLWAHGIKDWKLYYHATWGKLQYTNQLFLKGHIDEVDQKTNHYNTDISEFISSAKAGTLPAFSFIEPAWVGNSSGMGPNSCHPPSDMAPGLKMVADIYNALRQGPDFDQTLLIITFDEHGGIYDHVPPPYTNNAYRNDTEGGFGFDLLGIRVPTVLISPWIENSTVFRSVQEGRQYDATSFLSTLLQWQGIPASNWWLGDRIRAAASFESVFQAEHLRKDIPLSVQAPELDPKQLDMPMNELHQLFITRIVYTLCTGVLSPEEIEREVQDICALGSIRLATQALDKLEIRLNAVYSKS

SEQ ID NO: 6317 - protein, 66 aa, Xenorhabdus sp.
MLNDTQRNRAFFDAFESIDFSGKTVLDIGTGSGLLAMFAARNGAKHVYTCEVNSLLSEKAKKNHQS

SEQ ID NO: 6318 - protein, 92 aa, Xenorhabdus sp.
RERVLKEQGYRVHIQRKAARNKPLSHCQKGRNKKIAKTRARVEHIFGSLSQMGEKIIRTIGQLRANFAMTMKATCYDLQRLVYFGKSGIHAF

SEQ ID NO: 6319 - protein, 109 aa, Xenorhabdus sp.
KNIKIGIASASPLSLLLNIVEQCDIAKYFDYISSADDMPYNKPHSMVYLNAAEKLNVSPTKCIGIEDSKTGMIAVKAASMKCVVIPNNIEYNHSYWDVADWKIKNMSEL

SEQ ID NO: 6320 - protein, 218 aa, Xenorhabdus sp.
IIKVNGFQKHITVINKLSTNLISGVDLPENIDILVSETVDCGFFGEGFGHALLHAQRYLLKENAIIIPCAVSLKACLLASQDIAKLNYIYNEIYNLDISEFNTLRTMGYFPVRLQTWPHKIASNIVKFYNSTFKSGNSFEKEGNLSFTANTNTLVHGVLFWFELHLTNDIYLTNSPNNNHSHWMQAVQLFECPTHVKNGCEYQTTLFISENGVQFGDI

SEQ ID NO: 6321 - protein, 401 aa, Xenorhabdus sp.
MSGTTVSSLDGGEGVLNNVFSPYADYFIDMLSQRNSFIATQPVGIYESQIKHYICPDYFKNEQQELWKKIPQFITPIQSLENIGDFITVDYQGRVPMIVSKVDSDRCAVFENVCPHRGARLENQTEGCKKAFVCPYHSWSFSHQGHLIAARWRDAFPEIPDQYRSLNSINARQRFGMLWQMPSDPKPDFSLDNWFAAIEDQMTAIGFEQHQLLNSRERMVQANWKLLIENFIEYYHVQSLHRNSLAPTLNGQLYSLDSFAQHGRILTPLKNLAQVRQQTPHKIRREMVATYLLFPNVIIGVQPYHVFVSFYHPVSANQTWSKTFNFIHNADEEIKEVCQLDVEYLAEALEEDYEAIEQVQKNLEVSSAPSLLYGEAESLISQLHRNLAAILHPNGRKESQA

SEQ ID NO: 6322 - protein, 280 aa, Xenorhabdus sp.
VDLGSITIDGHLTDYSDFLAKEFDQLYVCSKTVSNLHICQQLSRHKHCLKGPVILFQNGFATERPFIDEALDVTIIRGVLNFSVTQHGKQKLKLRFLKTSYLGVPGQIKKIKERSETDILAALDLLNRVGIPFEGCTDIEHKAFAKNTLNAAASVCGLVRSGVETAMRNSSSRTVIQAIVDECTAIGEKAGYVRDSENFRRQSMGYLMSIPDFKSSLVLDVLHGKETEAETLLASFINLSQRMGLAVPNLDFVYRYFDFYNTYVTQSYTFTDMTLVKGDA

SEQ ID NO: 6323 - protein, 401 aa, Xenorhabdus sp.
VSIFGSELTEFAFGLWLLEKQMSVTAYTNMYLVLVLPAFLLMPLVGYVIDHYDKRKVLLFTEGIAGLALAIVLIFNHFGYLNNIVVYLYIALTSVLTALQIDCYSTLVFRLVPAASLNRANSLGSLSDSLPQMLAPIIGAFLFSHYGLGIVLTLDLMTFMISAFAAGLLFRVSAVQFLPHDDGTLSKLNWKAIFPDIGCVRLVRASPEMTYMIAYTFFKAILVGGTLITIVPYFTTYFSVADAGYMMSIGGVSMVIVSLISAWRPSILKRMPLFTLEFLFAAGFVVLTQIKNIYVAGICIALSFITMRISIIKMQTLWQTIVPKIYHGRVFALRNLVKTFSSFIIYLITGIVLDLLLAQEGGWAIWGQGNPMDLYFIGITLLILPPLLISTRRLLVAIGGE

SEQ ID NO: 6324 - protein, 1813 aa, Xenorhabdus sp.
VAGSVNHEPNVPLTAPEMPTPQQSLVEPQAADNRQPEPIVNESMVNQSVVNQSVVNQSTVNTPVVNVPMTPVRETKLDIETKQGIMVAQLNAMQQLFQQQLAVLQNIRGGTTNFITANQPSVSALAPVLSTAPIAPPAPITSTVPTASNTAPLTSTQSGKQSVEIPDHHTEQPQPEVAKPAASSGEKAKFTYKPVVLSEPVQCDAETTAFIQQYNAKTIASKNTIQKYRTALCDNRNAIQFNSKLKELCYPIVGKTAKGAHFTDLDGNVFIDIAMGFGVNFFGHNPDFIQQALQKRLQHGFHLGPVDESAMVVADLITEITGVERVAFTNSGTEAIMLACRVARAASGKQKVVIFNNAYHGHYTEILFMGGIKPGEQFPQSSGIPDNLGRDIVVLNYGEQQSLDYITAHGHEIAMVMVEPVQSRNITLRPESFIQTLRKITAQQNIVLLFDEIITGFRYHARGAQHYYQVKADLVTYGKVIGGGLPVGVLAGDAVVMDYIDGGFWQFGDASYPPNETTFFAGTFCKHPLSMAAAEATLLHMKAQGPSLQADLNDRTTGFVKRLNGLFTAANSGIEVANFGSLFKFSQKKNHELFFHQLLMNGVYTWEGRTCFLSTAHDDNVLEACFNAFEKTVEGITTASRSSSARPQDKPIAPKMQETTVLAEPRMQKNLAMASWYDPAASKSYNEFIQCVITDELQPHRLNSTIEYLFNRHQQLQQVFCPETFKTITGQFDYHAAMRVEQSPFDSPEQFSQWQQACMDEEFILDRGPMFRVHVAQVDLSKPLWNGTSLAQYASDHCRVDIICLVAHHTVVDGVSLDIFINELVAVYHGASDLPPAAQYQDYLGRLAAFKNTPDFIHQKSFWHKYLSGWQKDLANLPVTVPVELTEEGDVLATGGFHLEKLPAELTAKLLHYATQHRVTPYILMYTAYSIFLGSVLKQSQFVMATSVAGRNFDNFDNLIGLTTAMLPVRINTSNEQQLFSEYLDLTCEQLLEVLSHQDVTVDDLTVQSNSLSNRSEMLTRYLNYDFNFSPRKLRLNDSGSWSVLLDNPKRFIVGQLSLDVFQSENDLYLHWEYAAQAYSKVQVKMLSGQMAQLLDYLVSAPEQNALTLADITAYLKSLDAPSIAIGTVRKDFLYQAPIHALFEQRACDEPQACALVDTRSPEGVKPLSFAELNRQANALAHHLLHQGLQPEEPVFVRVRRGIPLAISVLAILKAGGVYVPVDKKLPVTQVEYLLSILTPRFAFIDEDYDTFSTLSHVQYFNFYDEETLLRQCGVDEIGVSEGDSALLKNPEKVIPAGQTAYITCTSGSTQKPNCVMNSHGAIAHHCLMMKEYLAIGPEDRMLQFTDLFWDIVLEELFPVWSAGGRVVFMGDTPPSTFSDFNQLLIEQQITLADLPSTYWQGWVESLDDPAMEYPSHLRRILVGTEKVDPQTLKKWQQHVPKGGIFSNAYAQTETTITATDSVITADTWVGETVPLGKPLANTGFYVLDEAGQPVPRGEPGELYIGGPLVSKGYYGNNTLTAAKYVADPYIPREACNHASPRMYKTGDLVSMDEQGCLSFLGRTDFQIKVRGYRIEPTQLESIIGQWDGVEQVVLTTNSVIDPRIPPAETKLLCYVKTQADKAEQKVLSERIRQYIRGNFAHYMQPHAIIYLADFPKTTNGKVSIKRFPLQPDLFPNNALQHSSLQMHVAERVTQAPSPVDLSSTAGRLLMTHLGQHGLNMNESFVALGGDSLIAIKILSALQKEYGMTLRLPEFMACETLADLIGWIESMLAESRVTTGSQASLPNNHAEMAGQKVKPVLQARSRKKKVMVE

SEQ ID NO: 6325 - protein, 572 aa, Xenorhabdus sp.
MVIGLYGILKSGAGYVPLDTDYPTERLNYILSDCAPKLLLTQQHLHSRLSTDTPVWMLDDNSHIECIARQPIHNPDPQQLGLAAHHLAYIIYTSGSTGQPKGVMIEHHNVVNFVHVQRQTNELTPSDRVLQFTSVAFDTTVSDIFATLAAGATLIMRPSELRVPDRAFAQFLQQQQITVTDLPTAFWHLWVQEMAAGRCSFSPSLRLVIVGGEKAELRHLMTWQTLPETRSCRWINSYGPTETTVIATVLKVDSHPDYSAETLPIGYPLANSRIYILDTRGKPVPIGVSGEIHIAGAGVARGYLNQPELTDERFIPDTFSEQPNARMYKTGDLGRWLPDGTIEYLGRNDFQVKIRGFRIELGEIETQLAACEGVKDAIAMVREDETGDKRLVAYLVPQPDAQLDIADLREQLSTHLLDYMIPSAFVVMEAFPLNPNGKLDRKSLPVPDRSATATRAYEAPEGETEQQLAAIWQTLLGLEQVGRHDDFFELGGNSLSIMQLSARLQEEFHLEISITDIFRHSALAKLAELILSKQVETFFDQDIEDMQKELENLSEDELLAMLNGEQLEGNKL

SEQ ID NO: 6326 - protein, 248 aa, Xenorhabdus sp.
KMKAIQITDIHLTQSREHQLFNANLYDNFDTICEEICRIKGITEIDLIIVSGDITNDGDIDAYRYFFKRMDSCQTPYMTIAGNHDLKNNIDTVITEIKPKYNITSGEYNDKNWFITYVDTVVKGEDYGFITQNNLAELEKRIILNKKFNTAVFMHHHIIPVGTPIVDSCMLENAADLLTLCKKHKVKFIGCGHAHTSRIWHQNDITISVAPAVSFQWLLGTTTVKTTKISGFNIIDFSENISVTSCNY

SEQ ID NO: 6327 - protein, 83 aa, Xenorhabdus sp.
RSVEIGSLLLGRDPDTGKQKESPMELMRLAIPRRVYTNDHMDYVVEAFIELKQHAADICGLTFNYEPPVLRHFMAKLKPISDN

SEQ ID NO: 6328 - protein, 125 aa, Xenorhabdus sp.
ALKPNERKVLFVIAEKLGISRMQFEQFLAMMEGGRHFGGQYQQNGHYQGAAQQRATLEDACKVLGVSQSDDATTIKRAYRKLMSEHHPDKLVAKGLPPEMMELAKQKAQSIQAAYDLIKKEKGFK

SEQ ID NO: 6329 - protein, 95 aa, Xenorhabdus sp.
MNFAKEQLQYIENEKYKKYKKNYFNHLRLNEKYRSVTESEKYTDQLLGRKSKGGLSWVTIGNDLLNNQNNQNNQNNQLTRDMHVHFIQGEISHFS

SEQ ID NO: 6330 - protein, 128 aa, Xenorhabdus sp.
IDDPRSDINKKHELMDVIFLAFSAVLCGASGWKSIQEFGELQIEWLKQYTSFTHGIPRRHCVANIIKMIDQDALVEAFYGWINQRRVTAGKSLIAIDGKTLRGTCKGTLFEALHVVSAYDVESGIALC

SEQ ID NO: 6331 - protein, 217 aa, Xenorhabdus sp.
MLEFYNPPTDPWLHVLYQDEHIMVVNKPSGLLSVPGKAEEHKDSIMTRVQAEFPSAESVHRLDMATSGIMVVALTKAAERELKRQFREREPKKVYIARVWGKLEPEEGLVDLPLICDWPNRPKQKVCFETGKSAQTEYQVLEYEAQATRVRLAPITGRSHQLRVHMLALGYPILGDRFYAHQQAKELAPRLQLHAQELSITHPAYGSPMHFECIADF

SEQ ID NO: 6332 - protein, 969 aa, Xenorhabdus sp.
MPFTLGQRWISDTESELGLGTVVALDTRMVTLLFPASGENRLYSRNDSPITRVMFNAGDTVTSHEGWKLKVDEVQQENGLLNYIGTRLDTEEENVILREVFLDSKLTFNKPQDRLFAGQIDRMDRFALRFRARKHQSEQFRLAESGLRGIRASLIPHQLHIANEVGKRHAPRVLLADEVGLGKTIEAGMIIHQQLMAGRAERVLVIVPDSLQHQWLVEMLRRFNLRFSLFDDGRYSEAQHDSDNPFETEQLVICSLDFVRRNKQRFEHLLEAGWDLMVVDEAHHLEWSEKAPSREYQVIEQLAEQIPSVLLLTATPEQLGQESHFARLRLLDPNRFHDYQAFIDEQQKYRPVADAVTLLLSGETLSNDQQNLIVELISEQDIEPLLKAANSNKEEESENARRELVAMLMDRHGTSRLLFRNTRGGVKGFPHRELHEIKLPLPSQYQTAIKVSEIMGAKKTVEARAKDMLYPERIYQEFEGENATWWNFDPRVEWLLGFLLANRDEKVLVICAKAETALQLEQVLREREGIRSAVFHEGLSLLERDRAAAYFASEEEGAQVLLCSEIGSEGRNFQFANQLVMFDLPFNPDLLEQRIGRLDRIGQNRNITISVPYLENTAQSVLLRWYHEGLDAFEHTCPTGRPIYDKYYETLLNFLAKPNEQTGFNEFISECRTHHEQLKQQLEQGRDRLLEMNSNGGEQGQILAETIAGQDNNTDLVNFALNLFDIIGINQEDRNDNIIILNPSEHMLVPDFPGLPQDGCSVTFDREKALSREDTQFLSWEHPIIRNGLDLVLSGDTGSCAVSILKNKALPVGTLLVELVYVVEAQAPKHLQLTRFLPPTPLRLLMDLKGTNLAPQVEFESFNRQLNAINRHNASKLVNAVQKEVHAVLQQSEPLVEQQARELIEKAKKEADEVLSAELSRLEALKAVNPNIRDDELEAIESEHKHLLLNLDQASWRLDAIRLVVVSHQ

SEQ ID NO: 6333 - protein, 777 aa, Xenorhabdus sp.
AEQGFILSRHWKDTPSGIELVYWLATDNGSRRITILHQKAVAFIPQRDLPEAEKRLAQERHYELKKLSLKDFNRQPVSALYCSQYHHLQHFEKVLKEQNIPLYETDIRPPDRFMMERFITAPVWFSQKADGSYQMKPNPDYRPKLKWVSLDIETSQHGELYSIGLAGCGEKTVFMLGSENGEQQELDFKLEYVASRPQMLEKLNEWLEVYDPDAIIGWSLIQFDLRVLQKHAERYNIPLRFGRGKGLLEWREHGFKPGHFFASAAGRLIIDGIDALKTATWNFPSFSLEYVAQELLGEGKAIDSPYDRMDEINRRFQEDKPALAHYNLQDCILVNRIFEKTNLMAFLLERATVTGLAVDRAGGSVAAFTHLYLPRMHRIGYVAPVQPTSFTDHSPGGFVMDSYPGLYDSVLVLDYKSLYPSIIRTFLIDPVGMVEGLAQPDKEHSVPGFREAFFSRTQHCLPDIVTYIWHERDKAKQQNNAPLAQALKIIMNAFYGVLGASGCHFFDPRLTSSITIRGHKIMHQTRKLIESEGYKVIYGDTDSTFVCLKKPHSEKEASQIGHSLTQYVNQWWKDHLKTKFNLESTLELEFETHYRRFLMPTVRGAEEGSKKRYAGLSGDKLVFKGLETVRSDWTPLAQAFQQELYSLIFYKKPYQDYIRNYIANTLAGEFDKRLVYRKRLRRNLTDYQRNVPPHVRAARLADEYNKQKNRPLQYQSGGWISYIITQSGPEPLENLTSPPDYEHYISKQIMPIADAILPFLQDDFTTLLTGQMNLTFD

SEQ ID NO: 6334 - protein, 130 aa, Xenorhabdus sp.
KAWKRGGTRVEALRMQCKENLEKMVVILAFIAVRVHQLRYVGLNKSEAEKQSCETLLSPLAWKLLWTKQEKKKLPKTAPSVYWAYINLGKLAGWYDSKRNGRVGWERLWEGWFMLQTILDGYLLSKSLDL

SEQ ID NO: 6335 - protein, 536 aa, Xenorhabdus sp.
MILSKKKKPGLLKLGIGLVSLAVAAGVQAKTLVYCSEGSPEGFNPQLFTSGTTFDASARPIYNRLVDFKLGTTEIIPSLSERWDVSDDGKTYTFHLRKGVRWHSSKDFKPTRDFNADDIIFTFMRQKDKNHPYHQVSGGGYEYFSGMDMENIINKIEKVDDYTVRFVLSRPEAPFLANLAMDFASILSKEYADVMMKAGTPEKVDLNPIGTGPFQLVQYQKDSRILYKAFKDYWEGPAKIDRLVFSITPDASVRYAKLQKNECQVMPYPNPADIASMKQNKDIVLKEQAGMNVGYLSYNVTKKPMDNLKVRQALTMAVNKDAIIEAVYQGAGQKAKNLIPPTMWGYNDDIKDYAYDPAKAKELLKEAGFANGFETDLWAMPVQRPYNPNARRMAEIIQADWAKIGVKAKIVSYEWGEYLKRAKDGEPQNVMMGWTGDNGDPDNFFGTLFSCAAKDQGSNYSKWCDKQFEDIILPARKTADVAKRTELYKQAQVVMHEQVPALIVAHSTVYEPIRKEVKGYVVDPLGKHLFYNVDLE

SEQ ID NO: 6336 - protein, 328 aa, Xenorhabdus sp.
VIPTFIGITLLTFAFVHMIPGDPVLIMAGERGISAERHAELMAAMGLDKPLWEQYLHYINGILHGDLGSSLKSRIPVWDEFVPRFQATLELGICAMLFAISVGISVGVLAAVKRGSVFDHTAVGLALTGYSMPIFWWGIMLIMLVSVHWNLTPVSGRISDSVFLDDSHPLTGFMLIDTLFWGEDGDFVDAVMHMILPAVVLGTIPLAVIVRMTRSSMLEVLGEDYIRTARAKGLSRLRVIIIHALRNALLPVVTVIGLQVGVMLAGAILTETIFSWPGLGRWLIDALQRRDYPVVQGGVLLVATMIILVNFAVDLLYGIVNPRIRHKK

SEQ ID NO: 6337 - protein, 323 aa, Xenorhabdus sp.
MALSTHVSGIRNKERMMTQLTEQSASSAEQTVSGAPKMMTPIQEFWHYFKRNKGAVIGLAYIVLMLLIALFAGLLAPHGPAEQFRDSLLLPPVWQDGGSWQFILGTDDVGRDILSRLMYGARLSLLVGCLVVVMSLVMGIILGLLSGYFGGAVDAAIMRIVDIMLALPSLLLALVLVAIFGPSIVNASLALTFVALPHYIRLTRAAVLVEVNRDYVTASQVAGAGAMRQMFINILPNCLAPLIVQASLGFSNAILDMAALGFLGMGAQPPTPEWGTMLSDVLQFAQSAWWVVTFPGLAILLTVLAFNLMGDGLRDALDPKLKQ

SEQ ID NO: 6338 - protein, 326 aa, Xenorhabdus sp.
MALLNIDQLSVHFGDEDAPFRAVDRISYSVEQGQVVGIVGESGSGKSVSSLAIMGLIDYPGKVMAGKLEFDGCDLTKISEKERRQLIGAEVSMIFQDPMTSLNPCYTVGYQIMEALKVHQGGSRKTRYQRAIDLLTLVGIPDPASRLEVYPHQLSGGMSQRVMIAMAIACRPKLLIADEPTTALDVTIQAQIIELLLELQQQENMALILITHDLALVAEAAQHIIVMYAGQVVEAGRATEIFKAPRHPYTQALLRALPEFAVDKARLASLPGVVPGKYDRPVGCLLNPRCPYATERCYQVEPALQLVGERQVKCHMPLDDKGRPTI

SEQ ID NO: 6339 - protein, 301 aa, Xenorhabdus sp.
PLLKATELKKYYPVKTGVFSPERMVKALDGVSFELEKGKTLAVVGESGCGKSTLGRLLTMIEKPTEGELYYLGQDLLLPDKEAEKLRRQKIQIVFQNPYASLNPRKKVGQILEEPLLINTTLTSEERREKVLQMMEKVGLKSEHYQRYPHMFSGGQRQRIAIARGLMLNPDVVIADEPVSALDVSVRAQVLNLMMDLQQELGLSYVFISHDLSVVEHIADEVMVMYLGRCVEKGDKHTIFNNPSHPYTQALLSATPCLNPELRRERIKLTGELPSPMNPPPGCAFAARCRPCFWPMYSAPA

SEQ ID NO: 6340 - protein, 233 aa, Xenorhabdus sp.
MKSRVKRSLTIKQMAAVTGVTLVTLAIFITIQLSHLLQQRKDDYINQLHNAAAQIQTPLTDALLSSDLNTAKTLLIGLKTSGILGRAELISRDDSRIMSLDFATHRPIPELAKRVFGIPVEINIPLHVYGISSKDLASQGHLILQVDSNRVYRFALNTLALMLTTYLLLALIITVSVSWCVNRIIIHPLRDIARELNEEHPPASMICPKGHQDDELGLLVKGYNRQISKQKSR

SEQ ID NO: 6341 - protein, 101 aa, Xenorhabdus sp.
MIMKGTNSIFVSAVTPWEISIKRALGKLEFKADFDLIMERNNFIPLAITHLHAENAGDLPRHHGDPFDRMLIVQSQMEGLTLISADSVFSEYGIRLLNARQ

SEQ ID NO: 6342 - protein, 77 aa, Xenorhabdus sp.
MTIQANMHEAKTHLSQLADKAVDGEVVIIAKAGKPYVQLVPICQMDRTPGGFENEISINERFYEADDDIQKMFEGSL

SEQ ID NO: 6343 - protein, 163 aa, Xenorhabdus sp.
RQISVGAMAIHHITDEMVADSPLIEDVIDKYKGADFLVAHNAAFDSRMMPEMDVPFICTLKLAKRLWPDMESHSNQYLRYALKLDVFVPDGLHAHRALYDCIVTAALFKRIKDESGWSDEEMLEISHQPSLLHKFRFGKHKGMTFEEVKKTNPQLFCVAIKAA

SEQ ID NO: 6344 - protein, 111 aa, Xenorhabdus sp.
MSAVYKAISNVAKELAETGIKKNSENKVQKFMFRGIDAVYNALAPALVKHGLLILPRITERAVTERATKTGGALFYVVVKAEFDFIATEDGSKHTVTTFGEAMDSHVNNLL

SEQ ID NO: 6345 - protein, 155 aa, Xenorhabdus sp.
MSNNELIQVDSLSLSAVFPSSTPLERLVLSFLLANTAFKLGGNYQPDYWTIQSIDDRLAYMVPTAKKMYSVFLPETAFSVTLSAEAFGLAVTSVLLTRIAVLDESGATAFRFSALREYAQHHPEAGLINSAFSLKFEEDIVCPSFIHTQHNNNPQ

SEQ ID NO: 6346 - protein, 136 aa, Xenorhabdus sp.
VCETDSVTEAVQRLKVIHLLGDWPVSEMPSAQCRRAFFPLTVMIYDAQDNKVLGGRFDDEIVWAQPVTVTSERLSLVQKQQHLCQSATFELSWQNAGAARVLWHEANLLSLHMISPDYHYHHEVQDILRHSATVSV

SEQ ID NO: 6347 - protein, 87 aa, Xenorhabdus sp.
MITAALLKRHFGLSLNDTALCETETVTELIASGIRPSDAINERGDKYDLTRMNASEISGSTPYLGMHDELTVIVDSQVADIFRQDFN

SEQ ID NO: 6348 - protein, 307 aa, Xenorhabdus sp.
MAEWVTNQLDVTGKSVCLDVMQQWVCGEEVPRYRQAVLQSLRLFLAGCAGILKPTKPFTYTPYPELVRGTAAPTAQNLAFEQWLALLQDNVLLTAENMKRIDSIYRQSGLSLLRWETIPVSARDMIARLLIRQYTDWFGVVSWSDNLDINACWEKLAVYPTSAQPCDMLMIRPTRLATEINGNSGLLKGMTTTAQCYDEHYGLEWPFGHHVRWERRHVSSLTVRFDTPWAAPSAELMGELSSVFDCEIRHWYSEPSGSLKGYDCYDQGEHVDSHNGQVGHENRPALYLVNGDKPETALALPAMAVGQ

SEQ ID NO: 6349 - protein, 227 aa, Xenorhabdus sp.
MASCPDYQKEFISLFKQTARSRNRYRVFQDFCNCAMAAIHNKYCFSEELEQFYLKTINKYEREDIDRIVKLFSYTALALAEAPCDFLGSVFMQLELGNKGLQQFFTPWSVARMMAQLQLNEVSDLLQTRPFITFHEPCCGAACMMLAAAEVLREQGHDPLSSMWVSAIDIDPLAAVMAYIQLSLTGIPAAVTIGDVLNDPGSQRTRYTPAHYLGNWSQRLQAYEHAA

SEQ ID NO: 6350 - protein, 101 aa, Xenorhabdus sp.
MLNWIEQKGDGGQAQYMVFQPAGGTGRLDDLGADDHVQVILVSGQNNPQPVIQRAQDILNYVAAHPDDACLNGVFNLGGLTTPIPTQENRYVIRLLFRCTS

SEQ ID NO: 6351 - protein, 92 aa, Xenorhabdus sp.
VYKALYIGSTQAALYTPIDTATLINSQFRDVRFDGVRLTGRVGYSANYAVYVHDPNVRQDFRRATAKKAFLKSGFDEMRREIDNAVAQELKL

SEQ ID NO: 6352 - protein, 59 aa, Xenorhabdus sp.
MFNFDERPVGQVDVQGPAKQLAIHPSRVIILCEGAEDGDIFSGTPLLRAPSSALPMTIS

SEQ ID NO: 6353 - protein, 36 aa, Xenorhabdus sp.
VLLLDGKYYAYHLDVEHVVTEKENVQANWAQRVSSE

SEQ ID NO: 6354 - protein, 289 aa, Xenorhabdus sp.
NLVEIFIDVDDFCRFFIPQWEQFCLNKGYRLRRRKGHMYPSEIMTILILFHLSHYRDFKNFYLEHIWRYHHHDFPTLLSYTRFISVAPSVLVPLCSYLTQPTGIAFIDSTRLSVCHNIRIPRHKVFEGTAQRGKTSMGWFYGFKLHLIINHLGEILALKITAGNTDDRKVVRELAKELIGSLYGDKGYLSQELANDLAQNGVTFITKKRSNIKASVLEDWDKMMLSRRFIIETVNGQLKNICQIEHSRHRSIKGFLLTVLTGLIAYCHKKKKPSLKVFYSEEEDIPVTA

SEQ ID NO: 6355 - protein, 113 aa, Xenorhabdus sp.
LKNTILDLSKLLTIGHSFNAYPNGNIYIGKIDTDPAISGNQIQVYLELEDGTYISVPQPLSINPAGYLVYNGQIAKFVTEQGHSIAVYDSYGVQQFYYPNVLKYDPEQFNEKL

SEQ ID NO: 6356 - protein, 293 aa, Xenorhabdus sp.
HLNRIQTFLAVVDCGSFTLAAKRLFISKAMASIHVKSLEEALNVPLLIRNTRGITLTEAGEVLYKDFREIFSNIQTSIENISDIHRSLSGTLSITSTAEFGAQFLLPLIGEFCKLHPNLGINYYADSSLNDLISERFDLAIRLGTLRDSTLRSRKLGNYAIVIVASSEWLKNNPVKSLDDLNAVQWIANSNLQAPTQWTLRNDKKEAFEFRAMARFHSNSALATKAMVCSGLGVAILPEWMVKEEIAKGELIQLFPDYTLPKQDITIVFAGDHRIRLKCRVFIDYLIQNLRIL

SEQ ID NO: 6357 - protein, 496 aa, Xenorhabdus sp.
MLHLFTGLDFYTGLMLVLALLFVLFYEAINGFHDTANAVATVIYTRAMRSQFAVVMAGVFNFFGVLLGGLSVAYAIVHLLPTDLLLNVSSSHGLAMVFSMLLAAIIWNLGTWYFGIPASSSHTLIGSIIGIGLTNAIVTSSSVVDALNIPKMIQIFMSLILSPMIGLVIAGAMVFLLRRYWSGTKKRRRIHMTPAEREKQDGKRKPPFWTRTALILSAVGVSFSHGANDGQKGIGLIMLVLIGVAPAGFVVNMNSTSYDIARTHDAVVHLQQYYEHHEPALTHAIELTPAISPVEDQLDMNFHCDNSRALDVLNTTETMLGSIQNYSELNPDQRNSMRRMLMCIADTASAVAKLPETSMEDARFLHKLRKDLLNTVEYAPMWIIIAVALALSLGTMVGWKRVAVTIGEKIGKKGMTYAQGVSAQVTAAVSIGVASYTGMPVSTTQVLSSAVAGTMLVDGGGVQSKTIKNIMLAWVLTLPISIALSGCLYWIALQLI

SEQ ID NO: 6358 - protein, 143 aa, Xenorhabdus sp.
MAYKHILVAVDLSPESRVLVDKAVSLARPYNAKVSLIHVDVNYSDLYTGLIDVNLGDMQARIADETRNSLKELSENSSYEIQETLSGSGDLGQVLVDAIKQYDMDLVVCGHHQDFWSKLMSSARQLINTVHVDMLIVPLRDED

SEQ ID NO: 6359 - protein, 447 aa, Xenorhabdus sp.
MNVPSSLVSFLESVQYHNPHQPEYLQAVREVLTSLWPFLERNPQYREQGLLERLVEPERVIQFRVSWVDDQGKVQVNRAWRVQFNSAIGPFKGGMRFHPSVNLSILKFLGFEQTLKNALTTLPMGGGKGGSDFDPKGKSQGEIMRFCQALMTELYRHLGPDTDVPAGDIGVGGREVAFMAGMMKKLSNNTACVFTGKELSFGGSLIRPEATGYGLVYFIHAMLKRHGMALDGMRVSVSGAGNVAQYTIEKCLELGAKVVTVSDSGGTVLDEEGFTPEKLAHLEEIKNKRYGRVEDYAKERGLTFLEGQNPWSVPVDIALPCATQNELHLEDAKILIQNGVKLVAEGANMPATIAATDAFLEAGVLFAPGKAANAGGVATSGLEMSQNAIRQNWKAEKVDIRLHHIMLDIHQSCVEYGGEGKQINYVQGANIAGFVKVADAMLAQGIL

SEQ ID NO: 6360 - protein, 409 aa, Xenorhabdus sp.
RYRIAFIFLAGFFIDCINIFMSAIALPNISHELNISESSVAWVANSYILGLTLIIPLSTWFASHLGARLTMAASMAIFSVGALLSGLSNDFVSLILFRFIQGIGGGLLIPVGQALTFGLFKKDERAKVSTLIMAVALIAPAISPGAGGVIVDHFSWRWVFLCNIPFSLITALLAILWIKKEKTTARRPDLIGLLLVSLALTALLFGMSLYAGSSSPWLPLTLAGTGILFSLLYVRHTRSIEHPILDLNVLRNNRMLFSVLVYYAVPGIFTGVNLLNIFFLQQVIGWTASETGLLMILFAGGSFCAMVACGHLYNHIGAARLFCTGLILHAGGIVLLTLVGAEHELLLLVAAYLLMGIGGGISANTAQTTAMLHFQGEHLARASTVWNLNRQMSFSIGAAVFTLLFNLLQ

SEQ ID NO: 6361 - protein, 407 aa, Xenorhabdus sp.
MEKFDVVIIGAGAAGLFCAAQAGQSGLNVLVLDNGKKAGRKILMSGGGRCNFTNMYAEPAAFLSANPHFCKSALARYTQWDFIDLVQRHGIAYHEKTLGQLFCDDSAQQIINLLLKECEAGQVTIRLRSEVTQIEKNEQEFEITASGKKVSAHSLVVASGGLSMPGLGASPFGYRIAEQFGLNILPTRAALVPFTLHKPLLEQLQTLSGVAVPSVVTAQDGTVFRENILFTHRGLSGPAILQISSYWQPGEYVSINLLPNIDLDDFLTQERETHPNQSLKNTLAKLLPKRLVECLQSLGQLPELSLKQLNSAQKKDLVTTLQCWQVQPNGTEGYRTAEVTLGGVDTNELSSKTMESHKVKGLYFIGEVVDVTGWLGGYNFQWAWSSAWACAQALVAVEINHTRHQTT

SEQ ID NO: 6362 - protein, 50 aa, Xenorhabdus sp.
MAWRNYQEKSDKAVGSDHAVHQAFFDQAQSLTIEKPVYQAEHLQLTFLYY

SEQ ID NO: 6363 - protein, 351 aa, Xenorhabdus sp.
MNDSYSGKSGKVKVMYVRNEGNNDSRNNNDRRNNNDRRNSNDRHNNNKRPSGKGREQGGRRYDNDRPEQPKERSPWRTVSRSPDEESKPDHGGISGRSHIDPEQLRRQRLEETRIYGENACQAMFQNRPDAIVRAWFVQSVTPRFRDALKWMAANRKAYHVVDDEELAKASGTEHHGGVCFLIKKRNGLNAETYLQQAPAKDCVLALENVGNPHNLGAIMRSCAHFGVQGVILQDTTMLESGAAVRTAEGGAEHVKGIDADGFTAALSQFRDAGYTIVTTSSHKGSTKLAEAKLPEKMVLVLGQEGDGLSDSVWEDGDIRLSIGGTGRVESLNVSVATGVMLAEWWRQNKI

SEQ ID NO: 6364 - protein, 233 aa, Xenorhabdus sp.
VTSTGLNLSARETPQSVSVMTKQLMIDENLDSVKSAIGSITGMTVNQADSDRFTFSSRGMTVRNMLRDGVPTFYDIRFNYGDNLMDTIMFDRLEVVRGAAGLMVGPGTPSAAVNVIRKRPTTEFRGEVTLEGGSWDKWRTGLDLSSSLNESGTIRGRFVTAYQRSNSFIDRDKHEKYPFYGIIEADLTDNTLLTIGADYQINHTRGGMFISSRGSRHSGLAAQSVGGAGIIRN

SEQ ID NO: 6365 - protein, 266 aa, Xenorhabdus sp.
VECLLALAGAVTQGLLRNPLGEPGLLGINVGAAVTVVFFSFIPALEEFSRFWSAFIGAGLSTLLFYLLSGGVRNTNPVRLVLTGAAINACLFAVVQGVVLINAQVMDSYRFWTVDSLSAMSLNEASLLIPYLLVAIVLTLSLSASLNVMVFGEGIAGALGANVARTRILSLLSATMLAAGATAMAGPVAFIGLAAPHLMRVWVGSDFRWLLPYCLFAGPCLLLISDVVGRLLIAPEEIMVGIITACIGAPLLYLVAKNRTQKIMVE

SEQ ID NO: 6366 - protein, 276 aa, Xenorhabdus sp.
IEIRLPRALLAIGAGMALALSGALFQLTTRNTLGSPDIIGINAGAALGIMVALLVWPDVLPTSVGAISGAGLAVLLVYLGNGAGMDRMQTGKIVISGIAIAAFCMAMVDFAVANIRAEQAQQIRALLSGSLASRGWQDVAIISGLVVFTPVLFWLGRQLRYTHFGHDIANTLGVPVRLIQIISILLAVIFAAMSVLVVGPISFIALSAPQIARRLVHAKGAALFCSALVGALLMLLSDFITLILPTPARLPVGLVTAVIGGIYLMYLLYAELRRTQ

SEQ ID NO: 6367 - protein, 270 aa, Xenorhabdus sp.
PSGVNSSVVTSRLKAQSLSLAYGKKTIIEDINLAIHDNEFSVIIGPNGCGKSTLLRAISRSMQPQHGEIQLDGINIHRYKPKAVARELSLLTQGAIVTEALTIYDLVSRGRYAYQTFLRQWSEADERIVREALQAVDLWDMSEKFVSELSGGQHQRAWFAMTLAQQTPIILLDEPTTYLDISHQIEMLDLCQRLHQQGKTLVLVLHDINLSLRYATRLIMMKSGHIYAEGKPEEIITEQSIADVFGLACRIIRDPESDKPLIIPRYNGRG

SEQ ID NO: 6368 - protein, 219 aa, Xenorhabdus sp.
MKVNAENIPEGSMIFHQWSDEKEFLPLMQRYQNEYYAKSDQKPNSKGLYSLWAQWYFGIVVPPMMLILLEYPQAADADYNLFQVEFHESGRPDMVYYQLTWTDEPISLLDRYYALLDRHIIPVCEKIESYKGINGRLLWNNIGYVMYWYLSNFKERMNDEQYEILVNNLFFEAKLPDGRDNPLYRTVILRNDIIQRRCCCQRNKLPGVGNCRDCPLEIG

SEQ ID NO: 6369 - protein, 33 aa, Xenorhabdus sp.
VIKNTHFFHGDFSYADLTTASLLIAYFMNLKTS

SEQ ID NO: 6370 - protein, 113 aa, Xenorhabdus sp.
MNIISPTIRFCSAYITKSNLSYANFSDVVLEKCELWENRWHGTHILGATFSGSDLSGGEFTAFDWYAANFTHCDLTNSVLGEIDIRRVDFQGVKLEPSQVAEIMEQLGIIVIG

SEQ ID NO: 6371 - protein, 252 aa, Xenorhabdus sp.
EKNRTVMLFKFKQAKHQQHLAQLPKLPQSVANIETLYQSEEFRSTLLERIAGAKKHIYIAALYLEHDDAGQDILTALYEAKQKRPELDIKILVDWHRAQRGRIGAQAAATNADWYCSMAEKYPNAHISILGVPVNTREALGVLHLKGFIFDDTVIYSGASINNVYLHRHEKYRYDRYHLLHNAKLAAIMKQYIDDSIISDKAVNNLACPNRPRSLEIKNFIRQFRGHLRSATYHVENQASNEELAVTPLVGL

SEQ ID NO: 6372 - protein, 880 aa, Xenorhabdus sp.
MSQRGLEALLHPKSIAVIGASEKPEKASSLLMRNLLAGNFTGPILPVTPNKSSVLGVLAYPSVDKLPLTPDLAVICTHHSRNLSLLAQLTELGCTTVIILSSHPSQFAELKQYSQKHHIRILGPNSLGILAPWIGLNASFSPIPILKGKLAFISQSAAISNTILDWANHRNIGFSYFIALGDSVDIDIDDLLDFLARDSKTSAILLHLEHISDARRFLSASRSASRNKPILVVKSSRTRKAQQLLGEQQNFDVAYDAAIQRAGLLRVQDTHEMFSAVETLSFMRPLRGERLLIVSNGTAPAAMALDELIRRTGKLADLEEETIAKLVSVLPDVQILQNPLDLGDASSTAQYIDALKILLDSRSYDALLLIHSPCAISDSMQTAVNVIRTIKEHPRGKWLTIFTNWCGEYSSQEVRRLFSEAGIPTYRTPEGAVTAFMHMVEYRRNQKQLKETPALPIGITSNTAHAHDCIQQALNKGNTQLDTHEVHSILEAYGLNTLPTWIAHSSDDAVSIAEKIGYPVALKLRSPDIPHKSEVQGVMLYLRTAKEVKTAAQAIVERVKQNFPQARIEGLLVQNMANRAGAQELRIAIEQDEVFGPLIMLGEGGIDWVNETQAAVALPPLNMALARYLVIQAIKSGKIKSGASLQPLDIPSLSQLLVRVSNLLIDCPQITRLNIHPLLASGSEFTLLDVTMELTPITDDPRNRLAIRPYPNELEETIYIKDDFACLLRPILPEDEPLLKEFIEQVTKEDLYYRYFSEINEFTHDDLANMTQIDYDREMAFVAIRYPTTKPEIIGVARAMADPDNIEAEFAVLVRSDLKGITLGSQLMAKLIHYAKEHGIQVLTAITMPENRNMIRLAKKLGFTIDIQLEEGIVNLVLKL

SEQ ID NO: 6373 - protein, 34 aa, Xenorhabdus sp.
ALRLDLDRIEHWVGLGASVSDRVAALIKDAKKAA

SEQ ID NO: 6374 - protein, 185 aa, Xenorhabdus sp.
VVTMSKQSGLEHPVDPIVLGKLGSAYGIRGWLRVFSSTEQAEDIFEYQPWFIQRSGQWQHVELETWKYHNQDLIIKIKGIDDRDAANLFTNSEVVVDSSQLPALEDGDYYWKDLTGCQVINTAGYNLGIVQDMMETGSNDVMVIKANLKDAFGIKERLIPFLDGQVIKKVDLATKIIEVDWDPSF

SEQ ID NO: 6375 - protein, 250 aa, Xenorhabdus sp.
MWIGVISLFPEMFRAITDYGVTGRAVKNGLLSIDCWSPRDFTYDRHRTVDDRPYGGGPGMLMMVQPLREAIQAAKAAAGVGAKVIYLSPQGRKLDQQGVCELAANEKLILVCGRYEGIDERVIQTEIDEEWSIGDYVLSGGELPAMTMIDSISRFIPGVLGRQASAEEDSFADGLLDCPHYTRPEVLDGMEVPSVLLSGNHAQIDRWRLKQSLGRTWLRRPELLESLALTDEQRMLLAEFQQEYQDQATN

SEQ ID NO: 6376 - protein, 117 aa, Xenorhabdus sp.
MSNIIKQLEQEQMKQDVPSFRPGDTVEVKVWVVEGSKKRLQTFEGVVIAIRNRGLHSAFTVRKISNGEGVERVFQTHSPVVDSIHVKRRGAVRRAKLYYLRERSGKAARIKERLGAK

SEQ ID NO: 6377 - protein, 362 aa, Xenorhabdus sp.
MQKDALNNIHILDEQVLITPEELKLKYPLSSSDLNAITNARNTIADIIHHDDPRLLVVCGPCSIHDVDAALDYAQRLKSLSAELSDCLYIVMRVYFEKPRTTVGWKGLISDPYMDGSFDMDGGLHIARRLLLNLVEMGLPLANEALDPNNPQYLGDLFSWSAIGARTTESQTHREIASGLSVSVGFKNGTDGNLNTAINAMKAASMPHRFMGINQSGQVCLLQTRGNPNGHIILRGGAEPNYSAEHVRDCENQMVKAGLVPSLMIDCSHGNSNKDFRRQSVVVDSVAEQIMQGNQSIIGIMLESHINEGNQSSELTRSEMQYGVSVTDACISWETTEQVLKKLHQQIKPHLSKRNITMKQAG

SEQ ID NO: 6378 - protein, 373 aa, Xenorhabdus sp.
MAAELSQLREKIDEVDKALLNLLSRRMDLVAEVGEVKSQLGLPIYAPEREASMLASRRQEAEILGISPDLIEDILRRIMRESYASENDKGFKKLNADIGPIVIVGGSGKMGRLFNRLLTLSDYEVRILEANDWEQAETILAGAGMVIISVPIHLTEDIIHRLPPLPEECILVDLASIKQKPLQAMLDVHKGPVLGLHPMFGPDVGSFAKQVVVFCDGRQPESYLWFLEQISVWGARLHKIDADQHDKNMSFIQALRHFTTFSYGRHLLKEDIDLQQLLALSSPIYRLELAMVGRLFAQDPQLYADIIMSSPENLELIRRYHQSFGQALALLENQDKKAFIASFNQVSEWFGDEANRFMKESRALLQQANDNRV

SEQ ID NO: 6379 - protein, 326 aa, Xenorhabdus sp.
MAQQIRLNTTVAESQLGQRLDQALAELLPDYSRSRIKEWILNDKVQVNGKIINKPKEKVLGGEEISIDAIIEEDARWEPQDIELNVVYEDDDILVINKPRDLVVHPGAGNPDGTILNALLYRYPEIADVPRAGIVHRLDKDTTGLMVVAKTVPAQTRLVESLQLREITREYEAIALGHMTAGGIVEEPISRHPTKRTHMAVHPMGKPAVTHYRVMEHFRAHTRLRLRLETGRTHQIRVHMSHIKHPLVGDQLYGGRPRPLKGASEEFREVMRNFDRQALHATMLRLYHPITGIEMEWHAPLPDDMVKLIDVMKADAEFLKMKWIGS

SEQ ID NO: 6380 - protein, 243 aa, Xenorhabdus sp.
  unsure (1)..(243): unsure at all Xaa locations
MTPLISPDWPQLEGVGXCSTXRAGGMSLPPYESLNLGSHVGDDPLYVERNRELLVKYARLPQQPVWLEQVHGTRVIRLAGQSVENNQADAVYTNQVGQVCAVMTADCLPVLFCSVDGDEVAAAHAGWRGLCAGVLENTVAQFTTKPDMIQAWLGPAIGPEQFEVGREVMEAFLATDPNLEQAFTPYGMKFLANIYLLARLKLKSIGIKNVFGGAACTVSEEKTFFSYRRDGVTGRMATLIWLK

SEQ ID NO: 6381 - protein, 584 aa, Xenorhabdus sp.
MRLDRLTNKFQLALADAQSLALGRDNQFIEPIHLMSAFLSQEGGSVRPLLMSAGIDTGNLHDRLNLALDRLPKVEGSGGDVQVSNELGRYLNLCDKLAQKAGDNFISSELFVLAALEERGTLSDILKAAGATKDKITKAIEMMRGGEKVNDQSAEDQRQALKKYTIDLTERAEQGKLDPVIGRDEEIRRTIQVLQRRTKNNPVLIGEPGVGKTAIVEGLAQRIVNGEVPEGLKNKRVLSLDMGALLAGAKYRGEFEERLKGVLNDLSKQEGSVILFIDELHTMVGAGKADGAMDAGNMLKPALARGELHCVGATTLDEYRQYIEKDAALERRFQKVYVAEPTVEDTIAILRGLKERYELHHHVQITDPAIVAAATLSHRYISDRMLPDKAIDLIDEAGASLRMQMDSKPEALDRLERRIIQLKLEQQALKKESDEASKKRLDMLNEELVEKEREYSELEEEWKAEKAELTGTQNIKAELENARIELEKARRSGDLARMSEIQYGKIPELEKQLAAATTAENHPMKLLRNKVTDAEIAEILARWTGIPVSRMLESEKDKLLRMEHELHKRVIGQNEAVDAVANAI

SEQ ID NO: 6382 - protein, 447 aa, Xenorhabdus sp.
MITLQFAIIIICLLIGTRYAGMGLGLISGIGLFILTFVFGLEPGKPPVDVMLTILAVIGCASVLQTAGGLNVMMQCAERLLRRHPQHITILAPLTTWMLTFLCGTGHVVYTMFPIIGDIALKKGIRPERPMAVASVASQMAITASPVSVAVVSLVSIIAASHGIGHAYGILEILTISIPASLTGVVLAALWSLRRGKDLDKDEEFQEKIKDPKQREFIYGNSETLLDQVFPKQAYRATWIFFAAIAIVVLFGSCTELRPVFEVKGELKPLSMNLVIQMMMLIAGSIILMTCKVKTSEIANSAVFKAGMVAIFSVFGVAWMSDTFFHSHLGDLKLVLEDIVQAKPWTYALVLFLVSKLVNSQAAALTAIAPMGLQLGVDPKLLIAFFPAAYGYFVLPTYPSDLACIGFDRSGTTKIGKFIINHSFLVPGLIGVSSACTVGYVLVNTFM

SEQ ID NO: 6383 - protein, 385 aa, Xenorhabdus sp.
TMERDLINIRKKISSIDADLLDLLAQRRQLACDVAQTKLHDNRPIRDKNRERELLDVLIDKGKSRGLDGFYITRLFQMIIEDSVLTQQALLQQHLNQTPYDTARIAFLGPKGSYSHLAARQFSARHFNQLIECSCHKFPDIFSLVEIGQADYGILPLENTSSGAINDVYDLLQHTPLSLVGEITLPINHCLLVSKESDLSKIKTVYSHPQPFQQCSQYLNQFPHWNIIYCESTAVAMQKVTEINSPDVAVLGSEAGGALYGLEVLENNLANQQNNSTRFIVVAQKPIEVSDQVPAKTTFIMSTGQQAGALVDTLIILKKHNIIMSKLESRPINGKPWEEMFYIDVQANIRSMKMQQALKELSGITHFLKILGCYPSENVPSVDPF

SEQ ID NO: 6384 - protein, 110 aa, Xenorhabdus sp.
MLVNITSKQMEITPAIRSHVEDRLNKLNKWQVNLINPHIVLSKEPQGFLVDATIGTPNATLVASAKHEDMYAAINELLMKLERQLNKVQHKGEARRAEHSVKESNLNLEI

SEQ ID NO: 6385 - protein, 244 aa, Xenorhabdus sp.
VMIRMKYLVAATTLSLVLSGCSSNKEAVPDIPPSQIYSNGQEKLQNGNYKAAIKQLESLDNRYPFGPYSQQVQLDLIYAYYKSAEFPLALASIERFMRLNPTHPHIDYVMYMRGLVLQAMDDNLLQDFLGLDRSDRDPENARAAFRDFSQLVRYYPNSQYVADAYKRLVFLKDRLAKHELAVVQYYTKRGAYVAVVNRTEQMLQNYPDTQSTREALPYMEKAYKALGLETEAHKVAALIAANPV

SEQ ID NO: 6386 - protein, 332 aa, Xenorhabdus sp.
SCKVSPLWDLGNNIQQGVVAAGETFMAYAGGHHQEKSQQSRDNGGSSPALLPEFQIGLHFLQGYIYPVENRYLKFPDLLSKDIKIPSSPLLVNDQKANRPVEVIQKTEVRLGSRDKVLFAGDSMMQGVAPHLKRRLYQEYGVSGINLSRQNTGLTYSSFFDWPKAIRNALNQDPDIRLVIVFLGPNDPWGIPARPGESYLKFASESWESVYRQRIEVILNDAREHNVDVIWIGPPNMRQKKLSGNMAYLSKLYQAEVAKMGEIYVSVNDMFKYQSENYSDYIGDGSSTIKLRSGDGIHFSLSGQKVIADSIFSLITAIQEPVEENAAIQTVP

SEQ ID NO: 6387 - protein, 354 aa, Xenorhabdus sp.
VDFSEPNLALLADKLRHSHSHTLHIVQLGDSHTAADFFTGKLRDLFQQRYGDAGPGFVSPMTIPGQRNARVKFSGDKTGWWLSSSRKEDRADFPLGGFIAMPERAGSTITMNLSPSDNHKYRMRVLYQSHDETYLKPQSSPLWRLPETQSEWRFSPDNPVFFPLKLSAHDAQLKMGGWLISRQNSGVMLSALGINGATINMLNKWQPEWINTLAQLKPDLVILAYGTNEAFNDALDLDSYRQELTAKIQRIRSVIPEAVILLIGPNDSLKNKYATGCEEQQPALLRDVIRVQQEVASKQHTLFWNWQAFMGGTCSIRIWEQQGLARPDYIHLSAAGYERSAEGLYKQFIELVGE

SEQ ID NO: 6388 - protein, 63 aa, Xenorhabdus sp.
MGTVADGEGGAVAILNRNEPAFYCVPPELYAYYLELAEDAELNKMADERMEFPEFVSVNLNEL

SEQ ID NO: 6389 - protein, 94 aa, Xenorhabdus sp.
MSYSLKFEKRALKEWGKLGHPVREQFKKKLAERMENPHVPSARLSGRHNRYKIKLRSSGYRLVYEVNDNEIVLLVIAVGKREGNEIYLVANKRD

SEQ ID NO: 6390 - protein, 130 aa, Xenorhabdus sp.
MVPELTVTDFSLSLDFYQRILGFNVLIRREDPDFAYLSLGEAQLMLEAFHDSGWNTGELSKPLGRGINLQIEVDNVASLLVSLKDNGIKLYRSVTDNHYCIGETSVCQREFLVQDPDGYLLRFSQFIEST

SEQ ID NO: 6391 - protein, 300 aa, Xenorhabdus sp.
MTESGVQQTNSDGSLSHSAKSESRILPIWGDEARARGYDLPEPFGVSYGYMNLRQNIIVDSIKFEFANPIWKPFEDATFIKTDSTRQKSESHMLKLDTWVLPFLNVYGVYGKTKGTSKTILDSVDFMGAEILEDGPVPFVLNFKGNSYGAGFTLAGGYNQFFAVLDTNYTRTKLDILDGELDATVVSPRLGYEFVFQPLFVGQGNTKVQLWTGAMYQNITQRFQGNVSGLNNLPDKIGGLVDLAEQAGGGNVKFDVKQHLAHKWNSTVGARFEVTRNFNLLSEVGFGNRNSFYISGEFRF

SEQ ID NO: 6392 - protein, 315 aa, Xenorhabdus sp.
MGVGLGVAVVGLYRPDSHDDISQNSSLGLSGFGSSTGAFGLNFTNYNFLASDQWRLFVSGTLNNIPTYYWGKGYSAGKDNSNKQSYRSREFDIRPRVLYRVADATYMGLGVNFSSVNAGDAQAKKYFEQSVGGASVISSGVSAYFSYDSRDFLPNPQYGQAIELIYTYFSPELGADYRFSTTQLQFSTYHQLSEKTVLAFDNYARFSAGEVPWNQLSLLGNSLRMRGYYEGRYRDKNIFTTQLELRHKLDWRHGVVGWVGMGTLSDTPSRLGERHWLPSIGVGYRFEFKPRMNVRLDFGIGKGSTGFYFQVGEAF

SEQ ID NO: 6393 - protein, 351 aa, Xenorhabdus sp.
MLKSTTHEQAKTDWLALPPVKSPEGLRACCAFGYDLKVNTLGFSVPLYHIDNIVEADKLGEHHYNDSVLGASAALLGVSNEKIGLLYTEKGGFIDISHVRDTADYTLYLFSQIYAHLGQEWTLSLDNELAARKIHFFAFTPPTDPAERYTLSAYLAAKLAFQLAAWHEIAQWYGYQSIPGFSEAISAFSPEDLYSNLLGARLALTLILQGQASSVSHFSVAIANILPMALNELGAYDRSGTKKMFDKVDGLWWNSYQRIPQKFLVLRRDYETRDNRYPLMPFGKEKFALRLSLPDSYRNFSLDKLAEFQLWPTKSMKNLPSPQHYWSVKDFPMLAENAEKQDRYQQQLNSK

SEQ ID NO: 6394 - protein, 409 aa, Xenorhabdus sp.
MGAGMFSGMPLEKITQTMQNGMSGTLGFLAVVVALGAMFGKILHETGALDQIAVKLLGSFGEKRANYALGVAGLICALPLFFDVAVVLLIGVVFAVARRTGGNVVKLAIPLFAGVAAAAAFLVPGPTPMMLASQMGADFGWMILIGLSAAIPGMLLAGPIYGNFISKHVTLDLPKDLNTPSIGKSQMPSFALSLALVLFPLVLVGLKTIAARFVDQQSALYQWLEFIGHPFTAILIACLVAIYGLAIRRGMSKEKVMEVCSAALQPAGIILLVTGAGGVFKQVLVDSGVGPALGNALVGAGLPIALACFILAGAVRVIQGSATVACLTTVGLVLPVIGELGYSGAQMAALSVCIAGGSLILSHVNDSGFWLFGKFTGATEGQTLKTWTIMETILGTTGAIIGMIYFALL

SEQ ID NO: 6395 - protein, 179 aa, Xenorhabdus sp.
MSDTQRPNHVFILMGVSGSGKSAVANGVARELSAAFLDGDFLHPRANIQKMAEGHALNDDDRQPWLKALNDAIFAMQRTNSVSLLVCSALKKHYRDILRSGNKNLSFLYMQGNLELIESRLKARKGHFFKPQMLISQFETLEEPTIDEKDVHFIDIKPSLDEVIKNTMTTIERITEGHS

SEQ ID NO: 6396 - protein, 35 aa, Xenorhabdus sp.
MGRKAAEALLARLKGEKLEQTLIDVGFTLSLGESV

SEQ ID NO: 6397 - protein, 345 aa, Xenorhabdus sp.
MKALVYHGAGKKLWEEKAPPQLIEPTDAIVRIVKTTICGTDLHILKGDVPTVEQGRTLGHEGIGIVELIGDSVRNLKVGDKVIISCITVCGSCPYCKRQLYAHCKDGGWILGHKIDGTQAEKVRIPHADNSLHRLPEDVDEEAALMLSDILPTGLEIGVINGRVQPGHTIALIGAGPVGLSALLASQFYSPAHIIMIDTDDNRLSVAQQFGANTIINPTRQNVVETIHKLTDGIGVDVAIECVGIPATFQICQDIIAAGGFIANVGVHGKSVDLHLENLWIKNITITTGLVNTSSTPMLLKSVQSGKISPEKLVTHHYSLSEIETAYDIFGNAAKEKALKIVLSA

SEQ ID NO: 6398 - protein, 112 aa, Xenorhabdus sp.
VEDPIQEKKYLPALEKLGYYLTVREPSFYQHRCFRLAKPKANLHVFGPACPEHIRHILFRDWLRKHPEDRERYISAKLQAADNVTHVMDYNQRKHAVVHEIYMKIFKHQGLL

SEQ ID NO: 6399 - protein, 88 aa, Xenorhabdus sp.
ADRILSGYSSLGAIIGALVAPFYVWWFKPEFTFPVAMLSCLILMRHHDNIQRLWRGQESRIWHKLKKKKEMTEKEKVQAEKEQHQQDD

SEQ ID NO: 6400 - protein, 91 aa, Xenorhabdus sp.
MKDDGQKRILAIDITHEGFREIIQQGVISHYHSEFSDSRDAWKKKVQHSDVVIQWDPERDISLNKLEQRIIEIGLRNQAVENYVSHWISNI

SEQ ID NO: 6401 - protein, 240 aa, Xenorhabdus sp.
FGHLSDPRVNRTLRHSLIDILTISICAIICGCENFNDIEEYGKTKEDWFRQFLELPNGIPSHDTFNDVLNRLNPHEFDHAFTAWVKSLAHLSEEIIVLDGKTMRGTLDKAKGGPAIHLVSAWSVANQLCFGQVKVSDKSNEITAIPKLLTLLDIEEATITTDVMDCQYQIADQIVAGQADYMLALKGNQGEFYGDIKLFLDTHLATHFTGIAHDRNRCVDGDHGRIEQQQVWLVGDVNGV

SEQ ID NO: 6402 - protein, 251 aa, Xenorhabdus sp.
MDSLKAKYIERYIAERKANKISHRTLQNEMSALRTILRQAGKPKLAAPDNPRLSNRALGIVGTSRTGTKTALTPAEFQAVFLQVEQKDRRVAAVMQLAYVLGLRTKEAVEAYKSLATWKKALENGHTSVRVVFGTKGGRPRQTVILDRAALQHAIAYAEREQAGHGGKLIDKPTITQAIDRYRYIVRYAGLHGNKAPHSMRYHFAQQSGEHYIAQGFSEREALALVSMDLGHGDGRGRYIWQVYYRNSDDE

SEQ ID NO: 6403 - protein, 128 aa, Xenorhabdus sp.
SGLCRNFLVPQGKAVPATKKNIEFFEARRAELEAKLADVLAAAQARAEQIKALGAVTIASKAGDEGKLFGSIGTRDIADAVTAAGVAVSKSEVRLPNGVLRTVGEHEVHFQVHSDVFAQLNVSIVPEA

SEQ ID NO: 6404 - protein, 75 aa, Xenorhabdus sp.
MARYFRRRKFCRFTAEGVQEIDYKDIATLKNYITESGKIVPSRITGTRAKYQRQLARAIKRARYLSLLPYTDRHQ

SEQ ID NO: 6405 - protein, 132 aa, Xenorhabdus sp.
MRHYEIVFMVHPDQSEQVPGMIERYSATITNAQGQIHRLEDWGRRQLAYPINKLHKAHYVLLNVEAPQEAIDELETNFRFNDAVIRSMVMRTKHAVTEPSPMVKAKDERRSRDLVLEEGLVDDVDEAGDSEE

SEQ ID NO: 6406 - protein, 244 aa, Xenorhabdus sp.
MSEIIYGIHAVKALLERDPQRFMEVYVLKGREDRRLTPLLQELESIGISVQLANRQWLDTQTENAVHQGIIARVKPGRQYQENDLPDLLAQCERPFLLVLDGVTDPHNLGACLRTADAAGVHAVIVPRDRSAQLNATAKKVACGAAESVPLIRVTNLARTLRLLQEHNVWIVGTAGEATHSLYQSKLIGPMALVMGAEGEGMRRLTRDHCDELVSIPMAGSVSSLNVSVATGVCLFEIMRQRSA

SEQ ID NO: 6407 - protein, 837 aa, Xenorhabdus sp.
LTDDNRGIAMSKDPFQEREAAKYESPIPSREYILDILSKHTTPVSRQEIAQELKLTSAEAQEALRRRLRAMERDGQLVFTRRQCYALPERLDLLKGTVIGHRDGYGFLRVEGHKEDFYLSAEQMKMAIHGDVVLAQPLRPDRKGRIEVRIVRVLEPKTSQIVGRYFIDAGMGFVVPDDSRLCFDILVPKEEICGARMGNVVVVELTNRPTRRTKAIGKIVEVLGETMGTSMAVDIALRTHEIPYNWPPMVEKQLAGLDENVPESAKEGRVDLRALPLVTIDGEDARDFDDAVYCERKRGGGWRLWVAIADVSYYVRPQTPLDAEACSRGNSVYFPSQVVPMLPEVLSNGLCSLNPEVDRLCMVCEMTISAQGRLSSYKFYEAVMNSHARLTYTKVGKILQGDQEQREHYKPLVKHIEHLHELYQALDVSRDERGAISFESEEAKFIFNAERRIERIEPVVRNDAHKLIEECMILANIAAARFVEKHREPALYRIHDRPREESILNLRSVFNELGLELPGGMTPEPKDFAELMKLVSERPDHELLQTMLLRSMKQAIYDPENRGHFGLALRAYAHFTSPIRRYPDLVLHRAIKYLLAQENGTAEQHWTPTGGWHNDMAQMLQLGDHCSMTERRADEATRDVADWLKCDFMQDQVGNVFTGLITSVTGFGFFVRLHDLFIDGLVHVSTLDNDYYRHDNVGQRLIGESSGQTYRLGDEVEIRVEAVHMDERKIDFALLSTTRKARNKGKTARDKAKKGAFERKGAKKGRDYKKSDNFEPDSRFRKKKKTEKASSGNKSDKTSDSQSGKAGKKKKISDKTKKITAKLKAKRAKKTRKIADS

SEQ ID NO: 6408 - protein, 139 aa, Xenorhabdus sp.
VQLTSFTDYGLRALIYMASLPEGQMTNITEVTEVYGVSRNHMVKIINQLSNLGLVNAVRGKNGGISLGKPASEIKIGDVVRLLEPLGLVNCDSCHITPACRLKSVLNQAVENFLEELNQYSLADMVEDNRPLYQLLLTK

SEQ ID NO: 6409 - protein, 432 aa, Xenorhabdus sp.
MGKNVVVLGTQWGDEGKGKIVDLLTERAKYVVRYQGGHNAGHTLVINGEKTVLHLIPSGILRENVISIIANGVVLAPDALMKEMKQLESRGIPVRERLLISEACPLILPYHVALDNAREKARGAKAIGTTGRGIGPAYEDKVARRGLRVGDLFDKETFAAKLKEIIDYHNFQLVNYYNEPAVDFQKTLDDILAIADILTGMVVDVSDLLYKATQKGELVMFEGAQGTLLDIDHGTYPYVTSSNTTAGGVATGSGLGPRYVDYVLGIVKAYSTRVGAGPFPTELFDETGEYLRQKGQEFGATTGRSRRTGWLDIVAIRRAIQINSLSGFCMTKLDVLDGLKEVKICVGYRQADGTVIDTTPLAAENWEGLEAVYETLPGWDESTFGVKEHSQLPEAALNYIKRVEELSGVPVDIISTGPDRSETMILRDPFDA

SEQ ID NO: 6410 - protein, 335 aa, Xenorhabdus sp.
MRKSFVFVIAAILVVLYSSIFIVYEGQRGIVLRFGKVVRDAENKPVVYQPGPHFKIPFIETVKTLDARIQTMDIKADRFLTSENKDLIVDSYLKWRIKDFSSYYLATGNGSISQAEVLLKRKFSDRLRSEIGRLDVRGIVTDSRGRLTTDVRNALNLGTSDEDSSADDAIASAAARVKKETKGAQPAFNPNSMAALGIEVVDVRIKQINLPDEVSGAIYQRMRAEREAVARRHRSQGLEEAEKVRAAADKSATEIKAAAYSEALILRGEGDAEATKLFADAFNKAPDFYAFIRSLRAYENSFRNEGNIMVLSPDTDFFRYMKDPSKQRTHSRAND

SEQ ID NO: 6411 - protein, 409 aa, Xenorhabdus sp.
MAWNQPGNNGQDRDPWGSSKNNGGNSGGNNKGGRNRGATDLDDLFRKLSQKLGGLGGNKGGNGSGQNPKFGGRLIGLAIAVVVVVWVVSGFYTIKETERGVVTRLGKFSHIVQPGLNWKMTFIDRVRAVNVESVRELATTGVMLTSDENVVRAEMNVQYRVTDPEAYLFNVTNPDNSLRQATDSAVRGVVGKYTMEKILTADRTIVRNDTQKVLEETIRPYHMGITLLDVNFQTARPPEEVKAAFDDVIAAREEEQKTIREAEAYKNSVLPIAKGNAQRIIEEAKAYKVSAVLNARGEVASFAKILPEYKAAPEITRERLYIETMERVLSNTRKVIANEKSNNMLVLPLDQVLRSQAEAAKAKSPEVKVTPEHRSTTHSTPAHGQSGYGSSGYGDSSDLRGDTTRQGRP

SEQ ID NO: 6412 - protein, 129 aa, Xenorhabdus sp.
VDSVLEEIEAHEIPSLLVMNKIDMLDDFEPRIDRDEENRPVRVWLSAQSGEGIPLLLQALTELLSGEIAHYELHLPPEAGRLRSRFYQLQAIEREWMEESGQLGLEVRMPMIDWRRLCKQEPNLPDYVV

SEQ ID NO: 6413 - protein, 211 aa, Xenorhabdus sp.
EGGELAVLVHVFFSQEKDTENLSEFESLVTSAGVSPVQIVTGSRKAPHPKYFVGEGKAEEIAEAVKNSGADVVLFDHALSPAQERNLERLCQCRVVDRTGVILDIFAQRARTHEGKLQVELAQLRHLSTRLVRGWTHLERQKGGIGLRGPGETQLESDRRMLRDKIKQILGRLGKVERQREQGRQARNKADIPPFPLLVTPMPENQVYSIE

SEQ ID NO: 6414 - protein, 100 aa, Xenorhabdus sp.
MAKGQSLQDPFLNALRRERVPVSIYLVNGIKLQGQIESFDQFVILLKNTVSQMVYKHAISTVVPSRPVSHHGSNANMASSVGNYQAGNSPAAQQENDIAE

SEQ ID NO: 6415 - protein, 130 aa, Xenorhabdus sp.
TLTETSGEVLPYRVHQFAIAPASREILHQRIAARFEQMIKSGFEDEVKALYARSDLHTDLPSIRCVGYRQMWSYLAGEISHDEMVYRGICATRQLAKRQITWLRGWDDVAWLDSDQPEQALKTVMQVIGT

SEQ ID NO: 6416 - protein, 103 aa, Xenorhabdus sp.
TNRLVLSGTVCKTPIRKVSPSGIPHCQFVLEHRSQQQEAGFNRQSWCRMPVIASGQLLQGYTHSITVGSRITVSGFINSHYGRNGLSKLVLHAEQIELIDSGD

SEQ ID NO: 6417 - protein, 252 aa, Xenorhabdus sp.
MDAKIIIQSAREREDIEEKSSDFIDASWPLFSNYDKVSEQYWDTLYEPPFSHFQKYAILQQGQEERLIGVLNSIPFLWEAPSLEQLPDEGWDAILRLGMEAKGQANMLSALSVTVDPEFRGCNIPALLINNVKQTAREAGLQGVVVPVRPSRKSCYPLQDFVEYCSWKNEKEEPFDPWIRTHWRLGAKIIKPAFRSMNIDGTVEEWEKWTEMKFPQSGKYIIPGALVPLVVDTEKQIAHYIEPNLWMLHSID

SEQ ID NO: 6418 - protein, 210 aa, Xenorhabdus sp.
FPCIFSKRAFKKKLLKFIFVENAEKSGIQHLAEGLKDYVELSQNWNGDLNTAYPLFVAFSQEAIRVQSISDYHAFGWEVLQKLHEIDPEPWPESISKYPDSSAWCMCFNGMQLFCNMSSPANQSRRSRNLGEHFIMVINPRERFDIVAGNTPDGRKIRENIRNRIDKYDDVPRSLQLGSYGTEALEWLQYGLLDENVKREGKCPFMFRKK

SEQ ID NO: 6419 - protein, 170 aa, Xenorhabdus sp.
VSQGRIADRAARMIEGAARTAEALKKHYGIQGHFIGKSAPPENDDWSVSLPQARETLVELRQAIEASIKGKNRTFMLANTCSASLASLPVVAREHPEAVVLWIDAHGDFNTPETTESGYLGGMVLAAACGLWDSGHGSGLRPEQIILVGARDIDPPEREILQNFRAHGTS

SEQ ID NO: 6420 - protein, 264 aa, Xenorhabdus sp.
VNGLQLTLSKRFLAGILIAVSLHISLIWLLNRHSESNDDSAHHLNQNSPLTSFSITMVAASALAEEPEPVELSQPVLTVPESPTAPVIALDKVVQTEKKIDTPAEPIKTQKPKKQPKEKPKENREKKSAQSSQTPQNSPEELETNGTDQVNSQSGMSQATTSQPLVGQGNSESDNYHARLRQEIERHKRYPRKAKRMKQEGTVTVNFILQDDGSITAAKIIQSSGYSAMDNEALKALSLAKSIGPKPTTLPADITLQISFELVR

SEQ ID NO: 6421 - protein, 937 aa, Xenorhabdus sp.
VTDNRDKDEAGYDAVYDKDISNIYIGKKEIERYKGASPADVIKGAVGVYSGDARNSGALDINIRGIQGQGRIPVTIDGTEQAITVGRGYNGANNRNYIDPNLISSIEIEKGPSLNRRVKGSVGGAVSIKTLNIDDVVPEGETFGINTKLETSSNSVKERTPSLSLGQDYRDVPNFIHNGIESDPALKITPHSSKDNKLFGFKDNAFRVAVGTRQEYFDLMLAYAYRHKGNYFAGKGGAHRYDAAATEADINLMLNPKTSLDPYLPFAARIYRPGNEVPNTSSKMQSVLIKNTWHFTDEQALQLAFRNTRMEFGDIMPSRLASVLAKENSVPQWPLANARQQAASLNYKWDSAANPYIDFDMNLWTTRTISNTNTSGGYPRGPVTRDYDWEGGKGRSTNIDGTLINTAVTNAQNNRWGVDISNKFELTQNLDLTLMGNFQRERLGSDDDISHIDNLYFFQSPARKGQRQEINLAFNFDWRPTSWLALGAGAKRVSYWSKDDFLNERRIARDRNYKEPGEIIGYKMSYWRTVTEDEANDFKKRNDEKYYSKLSRTEKRELRAKTKKIKDRNDRIQQKRWLVEEKFEWKYNPETGKLNKSDNPYFNGQLDMNEKVIDPISGREAYKYEYSANSLSNNDKILSQDVDSPWEPAPKRKSHAWAPTFSATAYITDDLRVYTRYAEAVRMPSIFEDTVGFSGVKENYIGLKFKPERAKTIETGFVYDFSQLVNAERNADIKLSYYNTVIENVFDRDNTYNFAQLDKQKLAGLELQARYDNGSFFTDMGLVYNMKNKVCDNNSAARMDSQNRYGVPECIDGGFPGGYLRTSIQPKYTANLNVGGRLFDEKLELGSRMLYHSRAENKDEKWLMGVLPNEYKGISNNPMRWNSVFTVDAYVSYQITPAISMELTGTNLTNRYYLDPLTRSMIPAPGRTFKLSLTSQF

SEQ ID NO: 6422 - protein, 437 aa, Xenorhabdus sp.
PIFAENNAALIVINGQKFQVEDNLDNVGFALFLATIHQQWPDVRRFLASYKKLSGYDSMLVNFAQGGLARLEENLELATYHYQQILNQQPDFPRVQLELARVYFQDHKNREAERLFSELSEKKQVPEAVLKNINSYLEAIKLRNGWRGSFSAGYAYNNNVNMSSNQDFACLKINEEQCIQQQIPKAVKAWGMSYDATISRRHQLFGNHGIAIRGLIYGENYYNYHDENENTFQLTSGYSYKNRNHDISFSPLFEYKQIAGDRFYHAAGIKTKWRWGITSQTTLDIESEHKQLRHQHNYRRKDGGLTSSYLNLFHTISKDFILFGGGDWTYRGNDQYPVDRYQQWGVRAGVGGQIYSGIHGVLFATLRDRRFGAYSPMLNAKRHDTEQIYTAVIRVPAAEIMGMTPSVTFRYRRNHSNVDWMYSYNKNEVLLRLEKFF

SEQ ID NO: 6423 - protein, 230 aa, Xenorhabdus sp.
MAQAHAAVGFGQSQVSSPSYVKVGPTQPGKGPHGGNGGEPGIGISSVYGGQITGFSGLTRMAPADSNGIHNISMAGAPGTHGGMGVFHFSKVANEEVYFGEWSQTGKADDPTHTVYYAGKDITTNIPTDGTATYTVTGINQYSGNNALSGTFTADFGEKTLVGSMANDAMTININADIYADASFEGDARVGNLAGSTEGHFFGDNASSLAGYAKFDGDHSKDTAFGGSKQ

SEQ ID NO: 6424 - protein, 276 aa, Xenorhabdus sp.
ISQMDKKKRENQQAVSGTTRIYVQQKNHLHTPKLDWVAEEVPVALVYNGISHVVMMASPKDLEHFAIGFSLSEGIITSPQEIRGIDIASGCHGGIEVNIELSSRRFAELKERRRSMAGRTGCGICGTEQISEIFRPIPPLPFTQTFSLVYLDQALAQLPLLQDIGSLTGCTHAAGWIDSEGNLLGGCEDVGRHVALDKLLGMRSKTDWQQGAVLVSSRASYEMVQKSANCGVEILFAVSAATSLAIEVAEKCNLTLVGFCKLGRATVYTHSQRLTN

SEQ ID NO: 6425 - protein, 242 aa, Xenorhabdus sp.
FFSINNHIPVEIFGYQPSYIEAVGTIAGLLCIWLASQEKIINYLFGLINVSLFAVIFFQIQLYASLMLQIFFFAANIYGWYAWSRVDEQQQKELKIRWLSPKQMFSVATVSLLFILIMTFNIDQIFGYMAKVSVVALQGMGFGITMPDLLPDAFPFWDSVMTVLSIVAMILMTRKHVENWLLWVIINVISVAIYYKQGVLAMSLQYIILTGIALNGARLWIKVAKNNHETSSTVSTSTENSN

SEQ ID NO: 6426 - protein, 350 aa, Xenorhabdus sp.
MNYQNDDVKIRKITELLPPVALLEKFPATKDTATTVREAREAIHNILTGADDRLLVIIGPCSIHDPKAALEYAERLNKLRRELKADLEIVMRVYFEKPRTTIGWKGLINDPKMDCSFDINDGLRTARKLLLDINDIGLPAAGEFLDMITPQYLADLMSWGAIGARTTESQVHRELASGLSCPVGFKNGTDGTIKVAIDAINAAGSSHCFLSVTKWGHSAIVNTTGNQDCHIILRGGKEPNYSAEHVSAVKEGLLKAGLKPQVMIDFSHANSAKQFKRQMDVGADVCGQISAGENAIIGVMVESHLVEGNQSLDDDEPLVYGKSVTDACIGWDDTETLLQQLSQAVRTRRG

SEQ ID NO: 6427 - protein, 33 aa, Xenorhabdus sp.
MVPVVMAVILGLIYVLGELFNLISKSETKGIER

SEQ ID NO: 6428 - protein, 254 aa, Xenorhabdus sp.
KNFYQLLAGAVVPFALVGNSWSAEKVTVFAAASLTNALNDIAEQYKKDTRGEVVASYASSSTLARQIEQGAPADLFISADQQWMDYISGKKLIIEDTRHTLLGNQLVLIAPKKSKLNKIDINQETKWSSLLAGGHLAVGDPDHVPVGIYAKESLQSLGAWDLVNPLLARTNNVRSGMALVEREEVPLGIVYGSDAVASKKVKVVGVFPQKSHKPVEYPVAIIKGHENQAVQDFYDYLKTPEAVEIFTRYGFNSL

SEQ ID NO: 6429 - protein, 230 aa, Xenorhabdus sp.
MLSEYEWQAILLSLKVSGIAVLFSLPLGILMAWVLARCQFFGKSLLDSVIHLPLVLPPVVVGYLLLMSMGRRGIFGEFLYDWFGVSFAFNWTGAALASAVVSFPLMVRAIRLALEAIDLRLEQAAHTLGASSLKVFFTITLPLSLPGIIVGSVLAFARSLGEFGATITFVSNIPGETRTIPLAMYTLIEMPGAETAAARLCVIAVILALVSLLLSEWLTRWGRKRLGAAC

SEQ ID NO: 6430 - protein, 276 aa, Xenorhabdus sp.
MLELNFEQHLGDLHMQVDTTLPAESITAIFGLSGAGKTSLINAIAGLTRPQKGRITLNERILVDTEHKIFLPPEKRRIGYVFQDARLFPHYRVKGNLQYGMSPDMQPHFGKIVELLGIEHLLSRFPITLSGGEKQRVAIGRALLTGPELLLMDEPMASLDLPRKRELLPYLEKLSEDIKIPILYVSHNLDEIIHLADNVVVMDKGKIRMSGTLEEVWSNSILRPWLQKDNLSSILTVTVMEHHQRYHMTAVAVADKALWLPEINVTEGTDLRIRID

SEQ ID NO: 6431 - protein, 50 aa, Xenorhabdus sp.
MIPPRSALKKDKQASEYHRRKIDELGDPLLVLDKYVDFSALADTLDRIVP

SEQ ID NO: 6432 - protein, 250 aa, Xenorhabdus sp.
MAVTKLVLVRHGESEWNKENRFTGWTDVELSDKGRNEAQQAGQLLKQEGFAFDFAYTSVLKRAIHTLWNILDQVDQQWLPVEKSWKLNERHYGALQGLDKAETAAKYGDDQVKLWRRGFAIIPPDLTKDDERYPGHDPRYANLKPEELPVTESLATTIERVVPYWEEVIKPRVANGEKVIIAAHGNSLRALVKYLDNMDEDEILELNIPTAVPLVYEFDENMKPIKHYYLGNADEIAAKAAAVANQGKAK

SEQ ID NO: 6433 - protein, 276 aa, Xenorhabdus sp.
MGWTLLAASLALLDIRQKIAFFIAFLAIAVGISTHILAYPAIISLLMISVLGVAHVYFNSKRHIIGKSITEAMLVIVSILLFIHFIPGFHNLKYLDKVQVGPLSAPFSMYFNFDKALVPFLLLCCMPSLLRCNPVVNAPAHGWAFLIAAIPALLGLATTLGGLAVELHLPSWFPAFVVANILFVSLAEEALFRGYIQQKLSQWMNPYFALIITSLLFGAAHFAGGGLLMAFATLAGLIYGIAWMWSGRLWVAVGFHFTLNVLHLLFYTYPIKAIIS

SEQ ID NO: 6434 - protein, 494 aa, Xenorhabdus sp.
MSELQVSQGSFRLSDTRILKIPSLKIISGENWAFVGSNGSGKSSLACVLSNELTQLTGEIQCSFHTPVRLSFEQLQQLVDKEWQRNNTDLLSEDEDDTGHTAAEIIQLHHKDNELCLELSAYFGIKDLLSRRFKYLSTGEVRKVLLCQALMADPDLLILDEPFDGLDAYARTQLSHLLATLAEKGITLIFLLNRFNQIPDFVERIGVLADCQLMLSGEKKHVLAESLVAQLAHSEKLKHIRLPETDEYRIDEQFPSDQPLVSMHDVVVQYNDKPILHGLNWQVNPGENWQIIGENGAGKSTLLSLITGDHPQGYSNQLVLFGRQRGSGETIWDIKRHIGYVSNSIHLEYRVSTSVRNVILSGFFDSIGLYQAVSDRQRQLADEWLALLGLSDTTANSPFHSLSWGQQRLVLIARALVKHPVLLILDEPLQGLDSLNRQLVLRFIDIMIKNGDTQLLFVSHHQEDAPECITHRLKFVPDGNIYRYETELTFSPLL

SEQ ID NO: 6435 - protein, 278 aa, Xenorhabdus sp.
MQAEILLTLKLQHRVFADPRRIELLKQIKITGSISQGARQAGISYKSAWDAINEMNHLADELLVKRATGGKGGGGAQLTPYGERLIQLYGLLEQIQQKAFDALKQDSLPLDSLLAAISRFSLQSSARNQFFGTVVERDNGNIQQNICILLADGKTSIRASVTEQSAERLGLIKGKEVIALIKAPWITLRKGATVSCNTTSSGDIDSFKNAAVFENQLSGQISQIEAGAQCSEIIVNLSSGESLCATLSNQEIESLGLQPSDTVTALFGADKVIIAALN

SEQ ID NO: 6436 - protein, 400 aa, Xenorhabdus sp.
QKDITKKRLLTIAGLGWMFDALDVGLLSFLLAALKQDWGLSSEQLGWIGSINSIGMAVGAFVFGVMADKTGRKSAFIVTLLLFSVGSGLTALVTTLAALLVLRFIIGMGLGGELPVASTLVSESVEPHERGRLVVILESFWAFGWLAAALIAYFVIPSYGWRVAMLLSALPAFYAIYLRLHLPDSPRYTQMRSRKPLNSIMHNIREVWSADYRRATVMLWILWFCVVFSYYGMFLWLPSVMMLKGFSLIKSFQYVLIMTLAQLPGYFTAAWMIERYGRKFVLASYLIGTAVSAYFFGTADSITQLLIFGILLSFFNLGAWGAIYAYTPEQYPTAIRATGAGMAASVGRIGGIIGPLMVGYLVAMNSSISLIFSLFGFSILVAVGAVIWLGKETRQIELIP

SEQ ID NO: 6437 - protein, 521 aa, Xenorhabdus sp.
SLSRCTIFNRVATFCRNLLIRETKIKRETQAASERPVTISDHPAHKKSSTLPKRRRVNRISSSNAENIKMKNKSGKAKPSDSPITVIPREQHSISRKDISDNALKVLYRLNKSGFEAYLVGGGVRDLLLHKKPKDFDIATNATPEQVRKLFRNCRLVGRRFRLAHIMFGPDVIEVATFRGPHEQVESNDRNQSHKAQSGMLLRDNIFGSVEEDAARRDFTINSLYYGIEDFALRDYVGGMADLEKGIIRLIGDPETRYREDPVRMLRAVRFASKLNMTIEKNTAEPIPRLAFLLRDIPSARLFEESLKLLQSGHGYSTYKLLCEYQLFEPLFPLIQRGFTQSGDSPMEKLLEQVLKNTDYRLQNDKRVNPAFLFAAILWYPLIEHAEKLTQEGGLQYYDAFALAMNDILDEQCRSIAIPKRHTTTMRDIWLLQLRLPRRQGKRANKLMEHPKFRAAYDLLELRASIEPRHELKELVHWWTEFQQSTASQQRGMISELGSEPVRRRTRHRRGNHLRHNRNNN

SEQ ID NO: 6438 - protein, 156 aa, Xenorhabdus sp.
YIAIGSNLASPLQQVNNALAALKSIPDTTFINRSSFYRTKPMGPQDQPDYLNLVVALDTNLQPEILLDHTQAIELAQGRVRKDERWGPRTLDLDIMLFGDHIINTERLTIPHYGLKQREFMLYPLAEIAPDLVFPDKETLAERLKHVPENGLTFWL

SEQ ID NO: 6439 - protein, 263 aa, Xenorhabdus sp.
MKPTSLAHLSQLKKEKRKFATITAYDASFAHLFAAQGIKVILIGDSLGMTVQGFDSTLPVTVEDIAYHTKSVRTGAPQTFLISDMPFMSYATPEQSCNNAAELMRSGANMVKIEGGSWLCETVKMLTERSVPVCGHLGLTPQAVNVLGGYKVQGRDEETAQQLLDDAIALEKAGMQLLVLECVPTELGRKITEALEIPVIGIGAGNHTDGQILVMHDALGITAKPPKFAKDFLKETGNIRDAISLYIEQVENGTYPDQAHSFN

SEQ ID NO: 6440 - protein, 285 aa, Xenorhabdus sp.
MLIIETIPILRREIRRWRQAGKRIAFVPTMGNLHDGHMALVDTAKAQADVVIVSIFVNPMQFDREDDLVNYPRTLQEDCEKLSRRHVDIVFAPNANEIYPHGLNGSQTFVEVPELSHMLEGASRPGHFRGVTTVVSKLFNLTQPDLAYFGEKDFQQLQIIRKMITDMAYDITLVSVPIVRDKKGLALSSRNSLLSTEEKKIAPQLNQIMQRAAEKLKSGERNIEHLLEIVSTDLREEGFVPDELFIRDAENLEPLTPQSKKAVILMAAWLGKTRLIDNQQVDLTA

SEQ ID NO: 6441 - protein, 295 aa, Xenorhabdus sp.
QPQQITIGYQKSNIFTLLKSRGTLDNALEKEGIKVRWVEFPAGPQMLEGLNVGSIDLASTGDVPPVFAQAARADLVYLAYAPAHPKTEAIVVPKDSAIKTIQDLKGKRVALNKGSDVHYLLAAALEKAGLSYKDIKPVYLPPADARAAFQRGAIDAWATWDPFLSEVEINTGARQITNGEGLVPHYTFYLASRKFVDTYPQTAEKIIQELVVLSDWANQHPDEAATILANATKLDKAIWQRTLARFTYGAERMTPTVFNQQQVLADTFTRLRLLPVKINVRSASWSLDNIPVNTP

SEQ ID NO: 6442 - protein, 159 aa, Xenorhabdus sp.
MEKNKHIDINRALTVGEVAKRSGVAISTLHFYESKGLIKSSRNSGNQRRFPAVVLRYIAIIKVAQSTGIPLKEIQKVLSQFPPNSKLTAEQWRILSSQWRDTLEQRITKLTHLRDYLDSCIGCGCLSLTECPLRNPNDILGETGTGARMFEQEYDGRKK

SEQ ID NO: 6443 - protein, 118 aa, Xenorhabdus sp.
MLGDVMVTAVYDGYVDLSPSLLKGLDINSIKNLITRMFQIENKEGVQTAITAYLVNTKEGLVLIDAGSSNCFGPTAGNIVDNIRAAGYQPESVKAILLTHMHPDHACDITSPSGEIVF

SEQ ID NO: 6444 - protein, 390 aa, Xenorhabdus sp.
INLFWFLPTHGEGRYLGTAKGGRAVDLPYLQQIALAVDSLGYHGVLIPTGRGCEDPWLVASALVPVTRNLRFLVAVRPGLQPPSLAARMTATLDRLSEGRVLINVVTGGDPVENKGDGIFLSHADRYQLTREFLDIYSRMLAGEKVDYQGKHLQVEGAELLFPPIQKNGPPLYFGGSSEDALDVAAQQVDTYLTWGEPPELVAQKLQQVRERAEKQGRTLEYGIRLHVIVRETEEEAWAAADRLIAHLDDETIAQAQKIFSRMDSAGQARMNSLHQGSRDNLQIAPNLWAGVGLVRGGAGTALVGNPGQVAERIREYQALGISNFIFSGYPHLEEAHRFAELVMPLLKTDSAQVNKANSTIRSAKAGAFGESIGGAERPVTEEPQKEYAE

SEQ ID NO: 6445 - protein, 263 aa, Xenorhabdus sp.
QGLSLTLEGVSKQFGEREILKSLNLSIQKGQFVAIVGRSGCGKSTLLRLLAGLESVSAGSLSADGDPLSASESEVRMMFQDARLLPWKKVIDNVGLGLSGNWKPEALAVLEAVGLADRANDWPSALSGGQKQRVALARALIHRPRLLLLDEPFGALDALTRLEMQQLLTRLWQQYGFTVILVTHDVHEAVLIADRILLIEQGEIGMDLEVPLGRPRTITMPTLSALEAQVLEAIMAPGEQGKHDRNSDWLHSGKMDNPESAAR

SEQ ID NO: 6446 - protein, 259 aa, Xenorhabdus sp.
TSLFKSRFLPWLLPGLLVVCWQVAGYEGWLSDRILPPPEKVLQAGWTLLQNGELWSNLYISTWRALSGFAIGGTCGLALGVITGLSKTGERLLDSTVQMLRNVPHLALIPLVILWFGIDERAKIFLVSLGTFFPIYLNTSHGIRHLDRGLIEMARNYGLNGWRLFWQVILPGAMPSILVGVRFSLGLMWLTLIVAETISADAGIGYLAMNAREFLQTDIVVLAIILYALLGKLADMVAYGLEVWLLRWHPSWQTGGRNS

SEQ ID NO: 6447 - protein, 309 aa, Xenorhabdus sp.
PVPSTSLPLALISLNDWGLVTVTGMDSRKYLQGQLTADINILAENQHVLTAHCDAKGKMWSSLRLFHRDEGYAYIERRSVIEIQVAELKKYAVFSKVMVAEETKSLILGVAGENCRAALAVFFPVLPDVNNTVIQHGATTLLYFSSPQERFLLITDTVMAAELMEKFPAQLSNSEQWLALDIEAGFPVIEAAVSAQLVPQAVNLHNIEGGISFEKGMYMGLATIARTKYRGVNKRAMYWLAGDSSYLPEVGSELEWQLGSRWRKTGMILSSLRLADGTVWVQAVLGNEMEAGSIFRLPGDDGFLLTLKN

SEQ ID NO: 6448 - protein, 251 aa, Xenorhabdus sp.; identical to SEQ ID NO: 5883

SEQ ID NO: 6449 - protein, 419 aa, Xenorhabdus sp.
MKTKRQHALVIFVDDLDRCLPQTAISTLESIRLLLFIRRSAFVIAADNDFIKAAVKVHFDGAGITGDVATNYFDKLIQVPLHVPRLGLNEAKAYLVLLLLERETNAGHFSKERFNHALSVIPEKLRNSWKGETINQEFLYELVEHVNALKSLMDLAQGLAALLHSSLAVNANPRLMKRFLNTVYLRDALSAPQGITLDIAALAKWHLLERCDESLAEELASRVHSDNDGRVQVLADAEAAAADQSSLPEPFKNTPFTQQWLQLLPALGTEDLRPLLHLSRDSGTRDFGDDNMTPDSRKLRDALKVATNGHESLVELMRKIGPSQTELAMTKAWQSNSASRTWKSSKEIVMLIECCKVYTEIGNKAVNLLDQAPLKLIGPGLIPTLGAQPWAQQLLERWKDLNELPKTTRNAIVNLGRRR

SEQ ID NO: 6450 - protein, 269 aa, Xenorhabdus sp.
MGTSTSSGGGRAGSPFDPEWLKPESDSTTGEGDSPDSPSEENGGNVIPDGAIAPERRFGPARSLLGGYLQNGSHDNLRGATKSMVSKGMGGVRRAAATMRGVASGVGSLGEFLTSVRDGNDQRVIDWLTYVRQENLSATDLTLEILKEVIPGTGSVDDESLRNAGAQAMAQLYELYPDVDIFNLTDAQIAEVMGLTIANEICNRIDLQLGQTYEKLKYDPLLIQERRSDIREWVGAEVRVVLEKQTTKNTEPKSLAQSILFSALEVFSE

SEQ ID NO: 6451 - protein, 276 aa, Xenorhabdus sp.
MEHGLAQKLRANTISKLMSPIYSLEAQIGTRIRNGYGIRAFNLQLAEEVAKVQESGNFPLVIGGDCSILLGALAGSRRTGPISLIHIDGHSDYRHPDNYDTNQMLGAVAGMDLALATGRGEALLTDWPDIESPLVPEQQVLQLGERENRDADFAWPDINQTAISQIDVFTANSIGEKGILNKIEQMLGAQPTWRFWVHLDVDVLDQSIMPAVDSPGSPGIELNWLKNIGAQLINNPLCCGMTVSVFDPDLDPDGYYAELIIEILEEMFLRCTSPSL

SEQ ID NO: 6452 - protein, 198 aa, Xenorhabdus sp.
TLQEDDFIFLSPHKSLLARGCFATLTLPASSGHHVESEFQQRVQQQLRLAQQAGVENPIVVGAIPFDKRQPCSLFIPQICHWFDRYAFNLSDSPVQVEGQTHFIPDHDAYCAMVESALNPLRIGALDKVVLSRLLQIESIPPLSALNLWLQLNRQNPQSYNFHLPLADGTLIGASPELLLRKEGNTLRSCPLAGSERR

SEQ ID NO: 6453 - protein, 562 aa, Xenorhabdus sp.
MTVTVNDKNTELGITLPNTLDGYGNQNISVTAAVVSSELTKPVTWQAEAFRKNGGELPSVGNPIEIKLPKYIPNGINSYPISATVELKNGKLSKTATMTVTVKDEDKNTELEITLPNTLAGYGNQSISVIAAVVSSEPTKPVTWQAEAFSKNGGELPGAGNEIQIKLPKYIPNGVNSYPISATVELENGKLSKTAEMTITVNPFAPGDKPFISEMEVSPKETLFGNGKDEYTYRVLIIDPENGQPLRNYKLNATWEVIVNELLRNDVYFKEQEQTTDNDGYLKALLVSKVGVDGVKVNLNITADDGNAYASNSKETPVNFKPVVQKAGLLIFGRHAHENKYTHEQDKPYNVYEGLTITLIKPSPNHEHYHEDIARYDDDIEYAPPSSDLVEIVNKKITFPFGTFSSSKTATVIATVTKAKSGAKYAYTYTFKPKRYVFSPDDVGDHGEVKLGDNSINNTCDKLDLRYSKGRQAESMTEEDVSENSTNSNSLGREYAYSPLEGFSGFGFLPYQGQPKDLKVKIKSKDKEGKFILYHYYAQGGQIDFEPAASNDFGRLLCQLKE

SEQ ID NO: 6454 - protein, 351 aa, Xenorhabdus sp.
VSESHQDLAVSTISPIEDEENISGYIEEDKASMVAQNIQRISGLLSSTPSQLAEQAKSYALGRLNGTINSEVQEWLSQFGTAKINLSLDRKGKLHNSSLDLLFPLYDNKVNWLFFSQLGYRNKDSRNTVNLGFGSRYFISDWMYGFNTFFDQDITGKNNRLGLGAEAWADYLKLSANTYIRLSKWHQSRDDKLWEERPANGFDINGEFFLPAYPHIGSKLGYEKYFGDDVTLFNRDTKQKNPGFAKVGMTYTPIPLITMGIDYRHGTNKHSDARFQANFNYRFGVPLSAQLSPDSVASMRTLAGSRYDLVERNNTIVLDHREKPSLEIRLPNTLHGDSEEEETIIATVTST

SEQ ID NO: 6455 - protein, 58 aa, Xenorhabdus sp.
MNSNQSNNKELCNLLREYSTPHVIREKEYDLDSLLAGVNGKNIHEEVDFGSPVGKETI

SEQ ID NO: 6456 - protein, 188 aa, Xenorhabdus sp.
MTDDNKQQMLCTFSATDLISNIQDVDKCISVYKAQLEQGDIQKAYHYLLRYMMHLKAYLTNNLADKFFFGNVSPGYLDFTYFSFFDDYLRERKLRFGIVLNHKALRFELWLMGKNATIQKAYWNILKNSSWNVERTEMPQYSVLEAVLVESPDFTNVALLTVRIKEEALRISEAVLDNLRGFEVDDKP

SEQ ID NO: 6457 - protein, 572 aa, Xenorhabdus sp.
MKKNIASVIVDILQNSGVKHCYGIVGDTLNYVTDAIHASDIEWIHVRHEEVGGFAAGAESFISGQISACAGSCGPGSLHFINGLYESHRNGAPVILIASQLATYVNDSSFPQYVDFKKVYSECSVFCEEISNPEKAIEITKNAISAALSQKGVAVIILPVNISKSEIEYTSKITVNYHPPQVIPALEDIKSLAVLLNKGNKIGIYAGIGSKDARDELLQLAEKLQAPIAHTSRVKDFIEYDNPYNVGMTGMLGMESGFTMLKNCNVLLLLGTDFAWPQFFPKKATIIQVDINLANIGKRHSVHLGINGGVKETLLELLPLLEKKTDDGFLRKSVEFHKKTLEKINWLDKGAKSKIIHPQYLVQLLDKHADADAIFTADGGSPVVWLLRYINTNGQRRTLTSLKHGTMANAMPQALGLKKAFPKRQIISISGDGGLTMLLGDLLTMTQEKLAVKVVVINNKSLNFVELEQKVEGLLNNYTNLDNPDFSKLATSLGIFGESIESPEKLEEAVIRFLNHDGPAVLDVHTSPNELVMPPNVELNSVVGMGLYTAKAILHGRSEEAIGLIIDNFIRK

SEQ ID NO: 6458 - protein, 90 aa, Xenorhabdus sp.
TEIWDFVQFCLAVCSADLSSPRRTSADGWTRNIQLTVGLCNPDKWLPLKSDLEDMLKVLTGDYWLLNFNNAGMEPPQGDGAFLSNDCVSL

SEQ ID NO: 6459 - protein, 55 aa, Xenorhabdus sp.
MVRIIILKHFHNLSDEKMEYQLLDRMSWQRFCRLTDVINIPDRNTIWCFEKRIGQ

SEQ ID NO: 6460 - protein, 145 aa, Xenorhabdus sp.
MNAIWIPVVSAFLASVFSLLIAWFTNCWNERRFNKQLKHEREKDSKKLLIEKGEKLIILLYSFVQWGSHRLGYESIDELPTKHEFDYIEFEFIAKTYFPEFENDISLVLENLKIKDDSSEIYKCFILETDKLKNKISLKLNELSK

SEQ ID NO: 6461 - protein, 85 aa, Xenorhabdus sp.
VLERWCVAYQFWRNAVMNIARQGNTVTGATGGPIKNPELTAKKEQQAEMDTTGSMLGLDPSSRQRLIGAAGQAKTDNPFMRMIAS

SEQ ID NO: 6462 - protein, 414 aa, Xenorhabdus sp.
MCKRTPLLMEAFGIEVNASNMNRPADGARFEPLIGNPGDGQSPSCAIVDEYHEHDTDDLYTTMLTGMGARRQPLMWAITTAGYNIEGPCYDKRREVIEMLSGNVPNEELFGVIYTVDEGDDWTSPDVLRKANPNMGVSVYVDFLLSQQQRALNNPRLASVFKTKHLNIWVSAREAYFNMVSWKQCEDTSLTLAQFEGQPCFLAFDLARKLDMNSMARLFSREIDGKQHFYSIAPRFWVPYDTVYCVEQNENRRSAERFQKWVEMGLLTVTEGAEVDYRYILEEAKLACHRNPVNEAPIDPFGATGLSHALADEGINPIIVTQNFTHMSDPMKALEAAIQSGRFHHDGHPIMSWCIGNVVGKTMGGNDDIVRPIKEQKDSKIDGAVALMMAMGRAILHEAPSLSDHLISHGVRSL

SEQ ID NO: 6463 - protein, 150 aa, Xenorhabdus sp.
MMAAPLVGLAGGALLSYGAWRLSGLEALGRKLQELEVDLQTKVLRQAGKTAMEIVQEDMQAHAGYDSKSKEPHLRDNIKTRSTKSKKYPGGVMITVGPTKAHRMKALAQEMGTIKQVPSPFIRPALDYNKQAVLTALAREISAALSSYSK

SEQ ID NO: 6464 - protein, 153 aa, Xenorhabdus sp.
MTTSPEYAVLPVGTVVKFGKPGDSVAQMKPLINCKALGATGLTGSFVDCTTLMDTNKQFISDMPEGPEKSLGFIDDPVNEDFVSFLNAAEKRETVQFYIALPNKRTATMVLALSGWEMNDINAPASEVIQITVKGKQNNLVWGIADSKTGVNP

SEQ ID NO: 6465 - protein, 115 aa, Xenorhabdus sp.
MKALKAALLTPRPQIKAVELFGTQINLRRMTALELLELEEKAEKLSEAGDGREASRLNIQMVLDCLVDDKGKPLPADFLPTAEELMIVHDNAILIEAIQTVKRHSIGTLEDAEKN

SEQ ID NO: 6466 - protein, 115 aa, Xenorhabdus sp.
MPPRIPRACRKSGCPKTTTDRSGYCTDHINTGWQTHQQGKSRHQRGYGSQWDKLKTRVKQRDNFLCQHCLRQGLVVTGITVDHIQPKAHGGTEALSNLKLLCEACHRQKTATERL

SEQ ID NO: 6467 - protein, 51 aa, Xenorhabdus sp.
FAHLKKRYWGQHFWGRGYFCATVGQLPEEMIKAYLAHHFEPNPNDHFRLDN

SEQ ID NO: 6468 - protein, 91 aa, Xenorhabdus sp.
VSWVRSQKNIQQCQGQLILLQGNKVHWQNVRWEMTQPPWLSRYGMMLSLCAFEQPKGFRHKSAVRLWVASDSMPPQMWRYLNQLMRQYPDT

SEQ ID NO: 6469 - protein, 313 aa, Xenorhabdus sp.
VPKKHDLSKNDVPEQSPLSDPLIEQFLDAIWLEKDLAENTLASYRLDLQCLNNWLVQGGYDLLSVQSIELQSFLAERVDGGYKASSSARLLSAMRRLFQYLYRENIRADDPTVLLSAPKLPKRLPKDLSEKQVENLLNTPSSDQPIELRDKAMLEVLYACGLRVSELVGLTLSDVSLRQGVVRIVGKGNKERLVPLGEEALYWLEQYLEYGRPWLLNGIVSDVFFPSKRGTQMTRQTFWHRIKHYAVLAGIDSERLSPHVLRHAFATHLINHGADLRVVQMLLGHSDLSTTQIYTHVATERLKVLHQQHHPRG

SEQ ID NO: 6470 - protein, 233 aa, Xenorhabdus sp.
MKKIAFCLSLILTAFTSNAFADNSMINQSLSNMGLKAESISPSGIAGVSSVLTQHGTIYLSNDGHYMFQGPLYDISSKIPKQIVNKSLVEKLEALKGQMIIYKAPKEKYVVTVFTDITCGYCRKLHENMKEYNDEGITVRYLAFPRHGLEHQSAKDMQSIWCSAKANKALDAAFKGDKISPIESCKKDIAKHYELGLQFGINGTPAIVLKDGTLISGFLPPKDLAKALAQHGE

SEQ ID NO: 6471 - protein, 577 aa, Xenorhabdus sp.
VNRKTQLRRRPAADDSLLPDSIHPLLRRLYVTRGIRQADELERGAKGLLNYQSLSGIDRAVSLLVEALQQHWRIVIVGDFDADGATSTALSIRALRAMGYRDLDYFVPNRFEDGYGLSVQVVNDVVKKGADLIITVDNGISSHDGVMVAHQHGLKVIVTDHHLPGETLPTADAIVNPNLTDCSFPSKALAGVGVAFYLMSALRAELRKIAWFEQQGIPLPNLAELLDLVALGTVADVVPLDTNNRILVYQGLNRIRAGRCCAGIRALLEISKREAAKLSASDLGFSLGPRLNAAGRLDDMSVGVTLLLTDDIVQARQIACELDGLNQTRREIEQGMQQEALQICDQIERTHTELPYGLAIYHPEWHQGVVGILASRIKERFHRPVIAFAPAGDGTLKGSGRSINGLHMRDALERLDTLYPGLMLKFGGHAMAAGLSLEQDKFELFQRHFSTLVAEWLDIAQLEGVVWSDGELTLGELSLEIAEVLRDGGPWGQAFSEPVFDGKFRLLQQRIVGEKHLKVMIEPLNGGPMLDGIAFNIDTKYWPDNSVKTVELAYKLDINEFRGNRDVQILIQHIWPC

SEQ ID NO: 6472 - protein, 343 aa, Xenorhabdus sp.
GIFDYDAKKERLEEVNAELEQPDVWNEPERAQALGKERSSLEGIVETIDQLEQGLEDVSGLLELAVEADDEETFNEAIAELEQLEEKLGQLEFRRMFSGEYDSANCYLDLQAGSGGTEAQDWASMLMRMYLRWADSKGFKTEIIEESDGDVAGLKSATIKIIGEYAYGWLRTETGVHRLVRKSPFDSGGRRHTSFSSAFIYPEVDDDIDIEINPADLRIDVYRASGAGGQHVNKTESAVRITHEPTGIVTQCQNDRSQHKNKDQAMKQLKAKLYELEMQKKNADKQVMEENKSDIGWGSQIRSYVLDDSRIKDLRTGVETRNTQSVLDGDLDKFIEASLKAGL

SEQ ID NO: 6473 - protein, 504 aa, Xenorhabdus sp.
MSQQQQGAEQAPDLNNELKTRREKLVTLRSNGIAFPNDFRRENISEDLHAKYDDKTQEELEALNVEVTVAGRMMTRRIMGKASFATLQDMGGRIQIYVSRDDLPEGIYNEQFKKWDLGDILGARGKLFKTKTGELSIHCSELRLLTKALRPLPDKFHGLADQETRYRQRYLDLISNDESRKTFQIRSRVMAALRNFMVSKDFMEVETPMMQAIPGGASARPFTTHHNALDIDMYLRIAPELYLKRLVVGGFERVFEINRNFRNEGISPRHNPEFTMMELYMAYADYQDLIVLTEELFRTLTQDVLGTTLVKYGEQEFDFGKPFVKMTMKEAICKYRPETNMADLDDMDKAVAIAESIGIEVDKSWGLGRIQCEIFEETAESHLIQPTFITEYPAEVSPLARRNDDNPFITDRFEFFIGGREIGNGFSELNDAEDQAERFAEQVRQKDEGDDEAMFYDDDYVTALEHGMPPTAGLGIGIDRMVMLFTDSHTIRDVILFPAMRPNK

SEQ ID NO: 6474 - protein, 172 aa, Xenorhabdus sp.
MKIGLFYGSTTCYTEMVAEKIRDILGEDLIDLHNVKDCDPQLMEEYSVLILGMPTWDFGEIQEDWLAIWDQLPSLDLSGKIVAMYGMGDQIDYSEWFLDALGMLYHHLLPTGAQFIGFWPTEGYEFTSPKPLTDDGKQFVGLALDDVNQFEETDERLSQWCMQILAEMEALF

SEQ ID NO: 6475 - protein, 107 aa, Xenorhabdus sp.
MQEYPELWIDLMYYLRNAWPQISGALLAIMICYGRLIYDGVERKNHWAEPLLCGALSWGFSSGLELIGIPVSVSPALGGAVGFLGVEKLREFVIRAIEQRLEEKAHK

SEQ ID NO: 6476 - protein, 250 aa, Xenorhabdus sp.
NSPKDEDALNLGLRFYQKLFIHHNHPNISSKAASRLPGALCFSVSQQQYKAAMSIIDDVNELKTELENIVTKESGVSKEQRFEFVHDHLRGLITLNAYRTITPLVDPDTINFGWANKNIINKVTKQQILERLEKSYNSGRAVPPYSSDQWTALVALEITDIKKLPDDVVLKIKRPVKVQPIARVWYSEIQKQVQYACPLPIIAFYTKDRGVTPKVGSLPNYNANTIKYRHKPKAKPLELIIPRLHLYREI

SEQ ID NO: 6477 - protein, 391 aa, Xenorhabdus sp.
MLKMTNQIQHYDWGSTTALTDIYGIANPDNQPMAELWMGAHPKCNSQVVDPETGQPIALNQLIAQDPEKYLGKKVARQFGRLPFLFKVLCAAQPLSIQVHPDKLSAEKGFARENAAGIPLDSPQRNYKDDNHKPELVYALTPFKAMNAFRPLSEITELLSYVSNAHPDIQPFIQHPTEQGLSFLFAQLLNMQGKQKSLALAVLKTALNSRQGEPWETIKKMTEFYPDDNGLFTPLLLNIVELQPGQAMFLYARTPHAYLEGVALEVMANSDNVLRAGLTSKHIDVPELMANLEFISKPAATLLTIPTQEKEALNYSVPVNDFHFSIYAVSGQPITLENDSASVLFCSGGQITVKSAEQELKLYAGESIFLAAAEKNVTIYGNGKFALVSNK

SEQ ID NO: 6478 - protein, 500 aa, Xenorhabdus sp.
MKKSLVAVGVIVALGAAWTGASWYTGKQVEARMDAALQKANTKLAEKMPDLGLELQKKDVKRGIFSTDVQLALTSKLDKKEGIVITSNIEHGPFPLSDIAKFKFGPKLALIHSELKDGELLKELFEITKNKSLLNVDTSVAYDGNLSFGINIIPVDYTTEKGLHWVISGANVTIDTNKDFSEITSTGKSDEIKFVQPAQQDTEFKMKNLSFSFNSKKNQSGIYLGDTSSNIDEVSLSGFGEDMMSINGIKSFSTFTEGEKNNLDGKYSLTVDGIKVKNQDFGSAKFVLGMYHLDNQAYSKVDRATYEALFKTINSFDIEKYSQITDAALMENLPALLKHNPTFTLETLSFKNSKGESTANFTTTLNNLPDDFSKLQNSNQEEIIRSLIKKFSLDIKLSKPMLTESIALSAMVRGENREAADATGKSVVQMIEAQATALNLFTHTDDSIDMNLNYADDKVKFNGEEFDLHQFLLDHNLIDSYDGADEQNQHDGEANLPAAE

SEQ ID NO: 6479 - protein, 333 aa, Xenorhabdus sp.
MIDTQLPLTDLHRHLDGNIRPETILDLGRQHNIILPAYELEALRPHVQIIESEPDLVSFLQKLDWGVAVLADLDACRRVAVENVEDAVNAGLDYAELRFSPYYMAMKHQLPVEGVVEAVIDGIHSASKQHDIQIRLIGILSRTFGEKACSEELAGLLAHKQHITAMDLAGDELGFPGHLFERHFIQARDAGWNISVHAGEAAGAESIWHAIRELGATRIGHGVKAITDPALMDYLAEHRIGIESCLTSNLQTSTVSTLSAHPLKKFLEHGILASINTDDPAVEGIEIRHEYHVASPAAGLSPEQIRLAQINGLETAFLSEAEKQALRMKVENR

SEQ ID NO: 6480 - protein, 193 aa, Xenorhabdus sp.
MTEYLLLFIGTVLVNNFVLVKFLGLCPFMGVSKKLETAIGMGMATTFVLTLASISSWLVNTYILIPLDLVYLRTLSFILVIAVVVQFTELAVRKTSPSLYRLLGIFLPLITTNCAVLGVALLNVNQSHNFLQSAVYGFGAAAGFSLVMVLFAAIRERLAVASIPAPFRGSSIGLVTAGLMSLSFMGFSGLVKF

SEQ ID NO: 6481 - protein, 177 aa, Xenorhabdus sp.
VEEDPIVEKVDNLLPQSQCGQCGYPGCRPYAEAVINNGEMINKCAPGGEQVMLKMSELLGVDPQPLDGDESIQNPARKVAFIDEDNCIGCTKCIQACPVDAIIGANRAMHTVVEDLCTGCDLCVAPCPTDCITMIPVATTTSNWKWDLNAIPVKNIPAEPNSLFMSSVKPVEVKANV

SEQ ID NO: 6482 - protein, 816 aa, Xenorhabdus sp.
IWDFDGGIHPPEMKLQSSRTPLRYAPLPEELIIPLQQHIGPEGELLVKAGDKVLKGQPLTQGSGRTVPVHASTSGTITAIEPCVTAHPSGLKELCVRLLPDGQDQWCEQVKTLDYTSLDADTLLQRIHASGIAGLGGAGFPTAAKLKGGGNYINTLIINAAECEPYITADDRLMQEHASEIIEGIRILMHLLNPKQVLIGIEDNKPEAISALNLALQGDKSIAVRVIPTKYPSGGAKQLTKILTGKEVPSGGRSSDIGTLMQNVGTVVAIKRAIIDGEPLIERVVTLTGEAVTSPGNFWARLGTPVQFLLQQAGFIPQSEQMVVMGGPLMGFTLPDLNVPIVKISNCILAPSVQEMEPKTAEEACIRCGLCVEACPAGLLPQQLYWFSRGQEHEKAKNHNLFDCIECGACAYVCPSNIPLVQYYRQEKAEIRAIDAETRRAAEAKLRFEAKQARMEREKLAREERHKKAAVQVGNQDTSAVQAALARVKEKQSSAGEEITVQAGQLPDNAAAIAARKARKEQLRARQAEKQTANAATATADSVANEEDPRKAAVAAAIARAKAKKAAQAQPESAPAPEVQPVVSEEADPRKAAVAAAIARAKAKEDAQTQPESAPTPEVQSVVSEEADPRKAAVATAIARAKAKKAAQAQPELTTVPEVQPVVSEEADPRKAAVAAAIARAKAKKATQAQPESAPAPEVQPVVSEEADPRKAAVAAAIARAKAKKAAQVQPESAPAPEVQPVVSEEADPRKAAVAAAIARAKAKKAAQVQPESAPTPEVQPAVSEEADPRKAAVAAAIARVKAKKAAQEKQETLTE

SEQ ID NO: 6483 - protein, 208 aa, Xenorhabdus sp.
MLETMRRHGITLAIFAACTTGLTAVVYSLTKDRIADQAALQHKILLDQVVPPALYDNDMPNECYLVTADALGSQQPHRLYLARKNGIPVAAALESTAPDGYSGAIQLLVGADFSGKVFGVRVTEHHETPGLGDKIDTRISNWIYAFAGKKITSPSDPHWAVKKDGGEFDQFTGATITPRAVVNAVKRTAIYMETIPTQLSSLPTCGAK

SEQ ID NO: 6484 - protein, 464 aa, Xenorhabdus sp.
MAATRIEKDSMGPIEVPADQLWGAQTQRSLEHFRISQEKMPVALIHALALTKQAAASVNMDLGLLPKERGDAIIAAAKEVLKDKHPTEFPLAIWQTGSGTQSNMNMNEVLANRGSEILGGQRGNERLIHPNDDVNKSQSSNDVFPTAMHVAAVIALREHLLPELEVLQKTLADKAEAFRDIVKIGRTHLQDATPLTLGQEISGWAAMLAHNLKHIENSIPHVCELALGGTAVGTGLNTHPEYAVRVAKKIAKLSGQPFIISPNKFEALGTCDALVHSHGALKGLVSSLMKIANDVRWLASGPRCGIGEISIPENEPGSSIMPGKVNPTQCEAMTMLCAQVMGNDVAVNIGGASGNFELNVFRPMVIHNFLQSVRLLADGMRSFNEHCAIGIEPNRDRITQLLNESLMLVTALNTHIGYDKAAEIAKKAHKEGLTLKQSAMQLGYLTEAEFDAWVRPEDMVGSMK

SEQ ID NO: 6485 - protein, 318 aa, Xenorhabdus sp.
IDPFLLTLLTVVMIASFFPCEGEVKTWFQYLTTAAIALLFFMHGAKLSRDAILAGIGHWRLHLVIFLSTFVLFPVLGMGLHFIVPEWMSPSVYMGFLYLCALPATVQSAIAFTSVAKGNVAAAICSASASSLLGIFLSPLLVGYLIQTHDGGSHPDTWQAIKDIILQLMVPFIVGHLSRPLIAKWVEKHKKLVNITDRSSILLVVYVAFSEAVVEGIWHKIDAYSLIMIGIVCCVLLAVVLTINVYSSRLLGFSKEDEITIVFCGSKKSLANGVPMANVLFPAAMVGIMLLPLMIFHQIQLMVCAVLANRYARRSKKV

SEQ ID NO: 6486 - protein, 346 aa, Xenorhabdus sp.
MSHLLKVGLVGYGYASKTFHAPLIARTPNVELVAISSSDAEKVKKDWPDMNVASSPEALFNDPDIDLIVIPTPNDTHFPLAQKALAAGKHVVVDKPFTITVAEAEALKKQAEEANLLLSVFHNRRWDSGFLTVQSLLKDNVLGELKYYESHFDRYRPAVRQRWREAAGAGSGIWYDLGPHLLDQAVQLFGKPQAITTDLGIIRPNAETADYFHAQLKYPTLKVVLHASMLVAAESPIYTLHGMSGSYVKYGLDTQEDCLKAGESLTQEDWGYDPRDGHVTVSQNDNLITQTVPNLPGNYGAYYAAVRDAILAGKPNPVTAEEAILIMKLIEAGEKSAKEQRTVVID

SEQ ID NO: 6487 - protein, 134 aa, Xenorhabdus sp.
RINGWLLAPAAYLVMTFIAASTMLVLYGITYSYQSTLIHRIGGDFAVQWYISVLTTAIMWCFTLWVLKLLFIRSKRFPRIFIIWLTLSVLIAVKAFAFSPISDELAVSSLFWSLLAAAVFVPYIKRSYRVKMTF

SEQ ID NO: 6488 - protein, 534 aa, Xenorhabdus sp.
MGMSIMQYEGQPLIEAKKIAHQFSGELKPLFSDIDITLHTGQHALIGRNGIGKSWLASILAKQTSPSEGSVKHFCDVGYLSQGLSTFTGSAANIFGLTDIINANERILAGIGEAADFDVMEGNWDWQFQIESLLAEGELTPEILNQPFNLLSGGEQTRLRLLSLKKQGAGFMILDEPSNHLDRQGRLWLSQWLATFNGGILLVTHDPKLLQHVSVVYELNGLGLSRSIGGWETWLDSKEQLRLGIQRDVDQTRKNLKQAIRDKQRDREKSDKRQSQGKQRRENANQATILLDRALNRSESTLSRLAKQNEERLQRSSSLATDARAKLDIIDPLSIAVATPQAATPPLLYLQDIILPFGSDSPISLTINNGDRLAITGKNGSGKSTLLKVMTGSLVPKLGACRITSSHRLMDQHFSFLDKTQSALYNFQLQSPGWTEDRYRTRLAQLRMRGEEALKPVGYLSGGEQLKVALACLFCGPSAPALLLLDEPDNHLDIESRELLQKALHDYTGAMVLISHDDQFIESIGNMQELILGG

SEQ ID NO: 6489 - protein, 154 aa, Xenorhabdus sp.
MPLPMTGIGIIVMLSQLSNSYGLAGSVSAIFVLTYALISPQISRLADHRGQYIVLPIATTISVLGILALLACAYWQAPIWTLFLCSSLAGFMPSMSAMVRARWTAIYRGQPQLQTAYSLETVFDEISFIVGPPISIGLSVAFFPQAGPLYTFSE

SEQ ID NO: 6490 - protein, 76 aa, Xenorhabdus sp.
MALIEKIVPEKRLTEGFTWLLSGLNTGAALGATATGQFVDIYGSHGGFIVSLIAGIGIIIATYYGHFTLTNSKESI

SEQ ID NO: 6491 - protein, 52 aa, Xenorhabdus sp.
MVLGTPLVTGVDILESHQNLGFNGALVFVCKDGNETSGEGLGDTKRLYFLSS

SEQ ID NO: 6492 - protein, 97 aa, Xenorhabdus sp.
MLIRAIEVVTDKTSENVLMVTLTLREVIIVDTAIVEGIKVPRVARTAPLEAQPTLDRGTVTPITIDKNQSLLNAGYEALDDFLGGALSRLGKQITGG

SEQ ID NO: 6493 - protein, 187 aa, Xenorhabdus sp.
MIEETRSKLLAAARNAFGSLGYANTSMDDFTAKAGLTRGALYHHFGDKKGLLMAVVEQIDSEMDQYLQSISDNAQDSWTGFRDRCRAYLTMSLNREFQQIVLRDSKIILGDQFRESQSYCISSMKKLLEKMILEKKIKDVDAESLACLINGSLVEAALWIADDTDQKAKLEKIIPAFDLLLDGLKCD

SEQ ID NO: 6494 - protein, 140 aa, Xenorhabdus sp.
VTGFMFSEDKKNVALISKLQPSWQKGQLNGIGGKIETGETPQQAMAREFAEEAGINTQPEEWKLFTVLTRPDAYQVNFLYAHDDRVYSAKSVEKEIVNIYEAQSLPDNVIYNLRWLIPMALDEHLRFDRSIEIIEMRENS

SEQ ID NO: 6495 - protein, 417 aa, Xenorhabdus sp.
ISVVGLQFGDEGKGKFVDYLSGGVNNIARFNGGANAGHCVQYGNVRGSFSQLPASLNKKNLYICQGALISLPVLVKEIDFIKRENINSSISIDPRCHIVLPLHAELNKASEKYKGKNKIGSVGVGVGACVEDKSNRHGIRLIDTLDKEKLRSKLEFLWDIREKQINHVFNDNSTLDFEEMLEITHQYGKKIEPYFTFTNEAIRDLLSAGEDILLETSQATFLDNSFGTYPYTVAYQTLVQTCFAMIGIPAQKMHIVGVMKAYMIRVGNGPFPTELQAEQADYIRERGNEYGTVSKRPRRCGWLDLCLIKHAVKLNGVTELAITNTDVLAGLEEIKVAIAYEIDNEQVCCDKALLQLEKVKPVYKVFKGWGELNASYAHFTELPAELIDFLNFIQDYAGVPIKYISHGPDREQTLIVQ

SEQ ID NO: 6496 - protein, 214 aa, Xenorhabdus sp.
IIWDWNGTLLNDVSVSVSATNLALAEIGIEPLTLEQYREYYCVPVQIFYKQVIGREPSSAEWSIIGKTFNTHYRPGIQKANLAAGVSDLLATRYQSGATQSLCSLMQHEELVPMINNHGITKFFTHVDGRNTPLLTTGKSEQLANHIKKINIAPEKSVVIGDATDDAIAALAAGTHAILYTGGTHSRLSLEAAGVPVVDTLNEALLMADYLVSK

SEQ ID NO: 6497 - protein, 324 aa, Xenorhabdus sp.
VKLLRIIDSLLGVPQITDEDIVPFIDGVKACAEIVCSTLTGRKSCFSPSLLQNLKLPAGTGHQVPRTYIEGDNHLITLAAAQIDECPNSSVIGVMLGGAATAAVTAAAWNSELNLVKVSRYDDACSNSHHIWGRNIPSGHSISIIDDNCGTGDTLRQVRDLVITQTGIRPKLRATELHWEKLLRTRVYGYSDRVFSPEFLDVLTPWCFRHHKVLNHLVNQLSIDEGKHAHTVHSHTTHSYTTTADWVSYSYSLLSVLYDTLEDSTWAPELLGFLSTLVSRQKMDCNQPIDAFRDIAQQCPECLSRNREFGANRSEQANTAKEVN

SEQ ID NO: 6498 - protein, 263 aa, Xenorhabdus sp.
MIGTKTFEVFPSVDIVDGIAMTSNSAIRLTRGESSTLRRPLGTPAEVALAWQNAGAKWIHVVDLDAASGRGSNSHLIADVIEAVDINVQVCGGIRNEEILSRVLATGCQRVNLGTAVLENPDWCARAIGEYGDKIAIALDVRSTPEGYQLATHGWNVNNGKLWDILEELERQGCQRYVVTDVERGGMMSSPNFTLLSEVCAKTSSPVIAGGGVSSIDDLRVLADMYDQGVEGAILGQALHIGKVPLEEAIAATRTPKAQAQRG

SEQ ID NO: 6499 - protein, 277 aa, Xenorhabdus sp.
LAIAVTGVWGLNFSVIKLGLNTLDPFLLAGLRFLLCALPAVFFIRRPDVPMKIVGLYGLIFGVGLWGMVNLGVKMGVSAGVSSLLLQFSSFITIAMGCFFLKERIHFHQIIGFILSVIGLGFIMALTDGSITYLGVIVILFGAVNWSVANIIVKKSGGKNIFGFLVWSCVFSPLPLFLMGYAINGSTVLSNFVENLNVTAIFSILFQAYLTTLIGYWIWNLLLKKYPVSKVAPLSLLVPVFGFIGSAVIFGEVMSNEKIIACVFILIGLAISLYGNK

SEQ ID NO: 6500 - protein, 199 aa, Xenorhabdus sp.
AIRHKRSIGIPINILFNCKCIALLSQWLVTDNKKISLLNFLTPESMAMDKLFMIHPANGGSESYAPLANILADSYNCIGIDNYNLSTDNQIDSLQELANIYMQLILAEISINQPIRILGWSLGGQLAMEIAYQLEQIGVQKIQLFLLDTVINNAETKILRNNIDISNSNLLLADKLQEMGASETYISKVLKAAPFEYRK

SEQ ID NO: 6501 - protein, 134 aa, Xenorhabdus sp.
MLNASKTAVVKIKRDQYECMYGAGPEDEFTLSHYEEKHFNLEDDDNIFHNCNASAKWVTWNIEYDAPNGEQKYCNVKLLTDYIDMEDGWRTYFYPTPGTNCQVPVNFVCDDSESNCYNGYISHDSSVNALVITE

SEQ ID NO: 6502 - protein, 60 aa, Xenorhabdus sp.
MSSSELVGAGMYRTDNGWKNIQFSCKLDATGKPQSFNYEDAKVPKLPMGPGPAVPPDKEK

SEQ ID NO: 6503 - protein, 105 aa, Xenorhabdus sp.
MLFLLFLLSPLSLAASFDCAKAKAPDEKAICASQKLNDLDVEMSVKYHFLHGLFAMGVSGEMYNSQQAWLKQRQQCGSNISCLINSYRQRINQLDTLYNSIEKPI

SEQ ID NO: 6504 - protein, 655 aa, Xenorhabdus sp.
VKEILAKYRQVIEKVVNENSQFTWDNLCQPISEARNQFERVWSPVSHLNSVKNTPEFRVAYEQCLPMNSEFSTWMGQHKGLYQAYKSLKESPEFEKLSQPQRKAVEDKLLDFTLSGIALPEEKQKRYGEITARLSELSARFGNNVLDATMGWTKLVTDVCDLSGLPENIKSSAKAAAKAKDLKGWLLTLDPPVYSAVMSYADDCELREEVYTAYMTRASDQGMNACKWDNNPIMEEILALRHELALLLGFKNYAENSLATKMAKTTKEVLDFLNGLVDRAHGQGEREMEELCEFAQSHYCVDELESWDVRYYSEKQKQHDFSFDEEQLRAYFPEKRAIEGLFEVVRRIYGITAKERNDVDTWNSDVRFFELYNDKEELLGSFYMDLYARAGKNGGAWQSSYVDRMRLASGELQKPVAFINCNFSGPAGGKPALFTHSEVSTLFHEFGHGLQTLLTTIETLDVAGTNGVPWDTVECPSQIMENWCWEAEALEFISGHYETNAPLPKEMLDNMLEAKNYQAAMKMLRQLEFGLFDFRLHVEYDPEEGAQILPILESVKEHVSVVPSSDWERFPNSFSHIFNGGYAAGYYSYMWADVLAADAYSRFSEEGIFNRTTGQSFLDDYLGRGGSEDPLTLFIRFRGREPKLDALLKRLGITG

SEQ ID NO: 6505 - protein, 91 aa, Xenorhabdus sp.
MFSLYTAYDVQHELKDFIKRQRKQQKSSVEELASRSGVPYSTIRKFERTGNISLRQFLMLLEAVDGLHPLHELTKERPREPTTIAEVLKMQ

SEQ ID NO: 6506 - protein, 680 aa, Xenorhabdus sp.
MTNPLLTSSVLPKFADIKPEHVVPAVKETLANYRQVIEKILTENSAFTWDSLCQPLSEEQDKLSRMWSPVGHLNSVKNSPELREAYEQSLPLLSEFSTWLGQHKGLYQAYKSLKESEVFNSLSQPQRKSIEDTLRDFELSGIGLPEEKQKRYGEIAARMSELGSQFGNNVLDATMGWSKLITDENDLAGLPESAKAAAKAAAEAKEQEGWLLTLNMPSYLPVMAYADNRELRQEMYHAYTTRASDQGPDAGKWDNNAIMAEMLALRHELAQLLGFASYAEKSLATKMAKNPQQVLDFLNDLANRAHGQGKKELEELTDFARSHYGVDKLEAWDVTYYSEKQKQHHFSIDDEQLRPYFPEQRAVEGLFEVVRRIYGITAKERNDVETWHSDVRFFELYDEKGELRGSFYLDLYAREHKRGGAWMDDCAGRMRFASGELQKPVAYLTCNFNKPVGDKPALFTHDEVITLFHEFGHGLHHMLTEIETLDVAGINGVPWDAVEQPSQFMENWCWEPEALAFISGHYETNEPLPQEMLDNMLAAKNYQSAMFILRQLEFGLFDFRLHAEYDPAKGAQILPTLYSVKEQVSVVPSPEWNRFPNSFSHIFNGGYAAGYYSYLWADVLAADSYSRFSEEGIFNRTTGQSFLDNILSRGGSEDPMTLFIRFRGREPKLDAMLKSAGITG

SEQ ID NO: 6507 - protein, 133 aa, Xenorhabdus sp.
MLERNPVVAALLDDGLQRGYQDEEIGGWLKERMTLIHASSITALTDITPQPDVVYLDPMYPHRQKSALVKKEMRVFQSLVGADEDADALLEPARALAKRRVVVKRPDYAEPMAGIKASAAITTKNHRFDIYPC

SEQ ID NO: 6508 - protein, 383 aa, Xenorhabdus sp.
KHLEIILKVSERCNINCTYCYVFNMGNTLAADSAPIISLDNIAALRGFFERSVIENHIEVIQVDFHGGEPLMMKKERFNQMCEILREGNYGNSQLVLALQTNGILIDDEWIALFEKHQVHASISIDGPKHINDRHRLDRKGKSTYEGTVNGLRMLQNAWAQGRIPAEPGILSVANANANGGEIYHHFSKELKCQRFDFLIPDDQHADSTDAEGIGRFLNEALDAWFADGQPNIFVRIFNTYLGTMLNSQFHRVIGISANVESVYAFTVTSDGLLRIDDTLRSTSDKIFNPIGHVRELTLSSVLESTNAKEYSSLNGELPEDCNDCIWSKICHGGRLVNRFSPTNRFHNKTVFCPSMRVFLSRAASHLIEAGVSEETIIKNIQQ

SEQ ID NO: 6509 - protein, 710 aa, Xenorhabdus sp.
SDQCALRGEGDPERGGKKPLTVVNILAEQAKPISLNADGEGEITLPIPDFNGELRLMAQAWSDDEFGNSERKVTVAAPVVAQMSLPRFMAGGDQSQLALDLTNLTEQPHKLTLNFATTGLIKLQESANNSITLETGKRVTIQIPVKADYGFGQGEIFLTVDGLKVSNEVQQYKNSWKIGVRPAFPAITRQFADVIRQDEEWLLPPDAITGLAPDTLEGQLLLTSRPPLQIARYIRELYAYPYGCLEQTISGLYPSLYSNEAELKKLGIKTQSDEKRRAAIEDGITHLLSIQRHDGSFSLWDRNGEEEFWLTAYAADFLFRANQQGYSIPVDALKNANNRLLRYLQDKNIINDRYSGSHSATQFSVRAYAGLVLASQQKAPLSSLRQLYEQRDQADSGLSLVQLGIALSMMGDDNRGNEAIHSGVSKSRKQGYGLNDYGSTIRDDALIVSLLTENNILQKERDEKLLALSNELSSRKYFSTQESNALYLAGRYFIDASEQPWNAVINRQIPPINRNTALNNALSAKQILNGIEISNRGDNSLYSRLNVVGYPLKKPEPYSNILNIKRTYLDLTGKTYTPDRLNSGELMIVKLEISATQPVSDALVVDLLPAGLELENQNLAYSSASLSESATDLQDMIYRMQRANIRHMEYRDDRFVAAVSVEPYQPVTLLYLARAVAPGVYQIPAPQVESMYVPYWRAVGVTGEKLEVVR

SEQ ID NO: 6510 - protein, 757 aa, Xenorhabdus sp.
FTLFSSLWLADKIWPLPLKNITAARVVVGADGSPLWRFADSEGIWRYPVTLEQVSPEYIQALLTYEDRWFYQHPGVNPLSLLRAAWQDIRAGKIVSGGSTISMQVARLIDPHSRTFGGKFKQLWRTLQLEWHYSKDEILEMYLNRAPFGGTLQGIGAASWAYLGKSPSDLSSGEAALLAVLPQAPSRLRPDRYPERAQAARDKVLQRLKQYGVWSAEKVADIEEENLWLAPRQVPQLAPLLARRMALNNQQEIIRTTIDTGLQRQLEDMVLNWKYQLAEKTSIGVLVVDHTDMTVKAYIGSADFQDNSRFGHVDMVSAWRSPGSTLKPFLYAMALDDGLIHAESLLQDVPRRFDNYRPGNFDSGFNGPVSASEALTRSLNLPVVQLLEAYGAKRLTANLRNAGMTLRFPLGSEPNLALILGGTSVRMDQLVSVYSAFARQGKVSPLRFTAQQELRDRQLFTPGAAWIVRRIMAGESRPLPDNVLPAEVPLAWKTGTSYGYRDAWAIGLNARYTIGVWVGRPDGTPVAGQSGYATAIPIMNQIHGLLMADLHYGSQPIPVDPRPENVSQAVICWPSGTAFRSEDSNCRQRRLSWILDNTIPPTLPSTGQESISGIHEQIWIDKNGLRVAADCTDARPETISLWPIALEAWLPEKERRVNRLPPINPQCPPIKTDDAPLLITGIREGDVLTRLPGQRTLDLRVATQGGQGQQWWFLNGEQVTVTENNQSWTKTLSQSGKYQLSVLDLSGQISIINFVLK

SEQ ID NO: 6511 - protein, 73 aa, Xenorhabdus sp.
VVNQGALKKCTHLLPEGHKYTISIIGTSDKTTKDSNEQFKGQFEVSDETKKPLDEKRQEQVKPFIQCVKDTVL

SEQ ID NO: 6512 - protein, 381 aa, Xenorhabdus sp.
TPDKTFTRDKTSGKINLLDLNRKQMRQFFIEMGEKPFRADQVMKWMYHYCYDDFEQMTDINKVLRAKLQQVAEIRAPEVAEEQRSSDGTIKWAITVGDQQVETVYIPEDDRATLCVSSQVGCALECKFCSTAQQGFNRNLRVSEIIGQVWRAAKIIGSLKSSGRRPITNVVMMGMGEPLLNLNNVVPAMEIMMDDFGFGLSKRRVTLSTSGVVPALDKLGDMIDVALAISLHAPTDDIRDEIVPINRKYNIEEFLAGVRRYLTKSNANQGRVTVEYVMLDHVNDSVEQAHQLAECLKDTPSKINLIPWNPFPGAPYGRSSNSRIDRFSKVLMGYGFTTIVRKTRGDDIDAACGQLAGDVIDRTKRTMRKRLAGEPIQVKTV

SEQ ID NO: 6513 - protein, 147 aa, Xenorhabdus sp.
MIRKSIIWSIVCLSLVAGCAEHPQNRAHHAVAVDTRLQLGKAYLAERNLSAARFHFQKVLLAEPRHPQAHLGMALHEQYAGQPESADRHYRMAMQYGAGDDTVIGHYYVFLCEQRRYKEAKNLVSDNLVTDNLVIKSNIGFYTHCGE

SEQ ID NO: 6514 - protein, 356 aa, Xenorhabdus sp.
MKTETHPEEANLTAGQILRQAREKHELSQQTVADRLCLKVSTVRDIEEDNVPDNIVPTFFRGYIRAYAKLVQVPESEILAKIDVQMQHKAVKTSQMQSFSAQKIRKKRDGWLMKFTWLVIIVLLGMTGVWWWQNYNVQQKELVSMAEQSDIQDQKSASELTDTQSVTASSTLNTTEVQSGTAQTEKNVQVPLNSAATDSKVPLSSGAPSSTQTGLVPQSGSQPLTASGNTASTGVSPVNQGAENSVTTNITPDAVSSTNPVSTTPLSTTENQSSVANSNELVFNFKGRCWLEIKDANGKKLFSGTKSKGDSLKLSGALPYSLNIGAPAQVEVEFQGKRVNMDAFIKKGTNARLTLP

SEQ ID NO: 6515 - protein, 373 aa, Xenorhabdus sp.
MHNESPITRRKSTRIYVGNVPIGDSAPIAVQSMTNTRTTDVEATVNQIKSLERVGVDIVRVSVPTMDAAEAFKLIKQQVNVPLVADIHFDYRIALKVAEYGVDCLRINPGNIGNEERIRQVVDCARHHNIPIRIGVNGGSLEKDLQEKYGEPTPEALVESAMRHVDILDRLNFDQFKVSVKASDVFLAVGAYRLLAQKIDQPLHLGITEAGGARAGAVKSSIGLGMLLSEGIGDTLRISLAADPVEEVKVGFDILKALRIRSRGINFIACPTCSRQEFDVIGTVNALEQRLEDLITPMDVSIIGCVVNGPGEAEVSTLGVTGAKTKSGFYEDGVRQKVRLDNNDLIDQLEAKIRAKAAILDASKRISINLLEK

SEQ ID NO: 6516 - protein, 425 aa, Xenorhabdus sp.
MAKNISAIRGMNDCLPAETAIWQRVESTIKRVLAGYGFSEIRTPVVEQTPLFKRAIGEVTDVVEKEMYTFNDRNGESLTLRPENTAGCVRAGIEHGLLYNQEQRLWYIGQMFRYERPQKGRYRQFHQLGAEVFGLQGPDIDAEMILMTARWWRELGIAEHVTLELNSIGSLEARANYRDALVAFLEQHKDKLDEDCLRRMYTNPLRVLDSKNPEVQALLNDAPALFDYLDAESKEHFDGLCRNLDAAGIQYRINQRLVRGLDYYNRTVFEWVTSALGAQGTVCAGGRYDGLVEQLGGKSTPAVGFAMGMERMILLVQEVNPEFVADLTVADVYLSSFGEGSQQAALILAEKIRDELPELRLMTNHGGGNFKKQLGRAGKHGAKIALLLGEDEMSTGNVTVKDLRNGEQQTLPQQTIAARLSELLG

SEQ ID NO: 6517 - protein, 206 aa, Xenorhabdus sp.
VEVYTTETEQVDAIKRFFVNNGKYIAVGLVLGIGAIVGWRYWQSHQTNQLQDTATAFEQMNQSLASGSKEGISAAEKFANETNNIYGVMADMELAKHVADKNDLAQAEKYLLTASGKAKDQDIQALSDIRLARIQLAEDKTDAALKTLEQVKSKGWQVITEDIRGDILAKKGDIAGAREAYSRGLESQGAHALKERMQVKLDNLSN

SEQ ID NO: 6518 - protein, 282 aa, Xenorhabdus sp.
VDIINQSDLVDDPFGNEKLGQPMINLTKVHDWGIFDLFLLTGFRERTFPGHTARLRAELNIDTRNAVYQHANKRSKLDFAVRSHHTLGNVDLGLSYFNGTERTPEFFLNSDHQLVPYYGQIQQIGLEYQWNINNWIIKWEGAYREKDRNFSKSPKTSFLVYSGGLEYTQYGVLGSGANLIFFLEYMKDTRNRFSDTPFGNDVFAGIQFSANDEQDSVLFLGVTQDMHYGSRAWSVNGSRRLGDNFKLSLNGAIFENLNAEDLLYGFRNESYIGMKFIYFFGI

SEQ ID NO: 6519 - protein, 506 aa, Xenorhabdus sp.
FESVVEHYDKKTALILNQERMSYGELNRRANAVAHYLLEKAPESKCIGIFLEPSFEMVISIIGILKAGYAYLPLDINNASERVRSILNDAKPDIVITNGLYLKVLSDFVVETFCFDRDYSPLLPSWEANPEKEVKGKQWAYIIYTSGSTGEPKGVTIAHYNVIHLFRAAEKRFNFSDKDVWTCFHSIAFDFSVWEIWGALLKGGMLVLVPYNISRNPPKFYELLVREKVTVLNQTPTAFRLLMQTDDYMSDKTESLSLRYVIFGGEMLNVSGLRQWIDKYGYEQPALINMYGITETTVHVTFHQVKPDDLDCNISPIGLPLPGVTIHLLNEAGEPVKENQTGEMYIAGLGVANGYLNRPELSRQKFVPDTFERSASNLYRTGDLARYRENGELYYLGRIDNQIQIRGFRVELGEIESAMRKLSFVKDAIATIYRQEPNELKIVVVYQSNKADKIQHKEIRQLLKEYLPDYMLPDFTKRVVEFPMNKNGKLDLNQIGWGKDEINDNK

SEQ ID NO: 6520 - protein, 125 aa, Xenorhabdus sp.
MIGYITLGTNDFSRAATFYDELLVELNAKRVMETPTFIAWGPDFNVTNLCIIKPFDGNPATVSNGGMIALNVDSQEKVNAVYNKAIALGAIDEGKPGLRGDHGFYAAYFRDLDGNKLNVFCMLQG

SEQ ID NO: 6521 - protein, 101 aa, Xenorhabdus sp.
VEIIEGHLMPDHVHMLVSIPPKLSVSSFMGYLKGKSSLMIFDRHANLKYKFGNRKFWAEGFYVSTVGLNEATIQKYIREQEKSDLISDKLSSKEHVDPFKG

SEQ ID NO: 6522 - protein, 591 aa, Xenorhabdus sp.
HLITRLQQQVSKYPEKIAFRQWSASEQLEMSWQDVDSKTKSIARSLLSLEVGIQEKIGIFADNSMAWSLSDLAILQLRAVTVPLYATSSRDQAAFILNDAGVRILFVGGQEQYDIALILLALCPQLNHLVVLDESVDLKECPQALYLSAFIADDRPLYQAELDSRIAGLDLHDLFTLIYTSGTTGEPKGVMLDYQNIAAQLYLHDQRLTLTEQDISLSFLPLSHIFERAWSYYVMHTGALNVYLTDTNFVREAMLDVRPTVMCSVPRLYEKIHSAILEKVSRAPFWRRIIFQWAIKRGERRWSRQLNDKKSCPFSLCGEKLADRLVLNKLRQLLGGRIRFLPVAGARLEDSIMRFFLSVGLNIKYGYGMTETCATVSCWEEKNYLLGSIGTPLPGVDVRISTAGEIQVRGPIVMKGYYNRPEDTVHAFTEDGWLRTGDAGGLDETGNLFITERLKDLMKTSTGKYIAPQLIEGTLGQDRFIEHIAVIADARQFVSALIVPSYEALEDYAKSINLHYQNRLELLRNHQVIGLFEQRLKELQKNIAKFHQVKRFTLLPESFSMEKGELTPTLKLRRKVISQRYQSEIESMYRD

SEQ ID NO: 6523 - protein, 576 aa, Xenorhabdus sp.
SMEMLSGAEMVVRSLIDQGVEHVFGYPGGAVLDIYDALHTIGGIEHILVRHEQGAVHMADGYTRSTGQTGVVLVTSGPGATNAITGIATAYMDSIPMVVLSGQVASSLIGNDAFQECDMVGISRPIVKHSFLVKKAEDIPNIIKKAFYLAASGRPGPVVIDFPKDTVNPALKFPYIYPEKINMRSYNPTIQGHKGQIKRALKALQEAKKPVLYVGGGAINSDCSAELLKLAESLRLPVTSSLMGLGAFPATHQQSLGMLGMHGTFEANKAMHNADIILAVGVRFDDRTTNNLAKYCPQAAVLHIDIDPTSISKTVTADIPIVGDAKQVLGQMVELLDATESSQDPDAIKDWWLSVEQWRNRKCLDYDRASPKIKPQAVIEALYRLTKGDAYIASDVGQHQMFAALHYPFDKPRRWINSGGLGTMGFGLPAALGVKLANPEATVICVTGDGSIQMNIQELSTALQYGLPVLVLNLNNRFLGMVKQIQDIIYAGRHSQSYMESLPDFVRLAEAYGHIGVSIQSYDELESKLAQALREVTENQRLVFVDVTVDETEHVYPMQIRGGAMDEMWLSKTERT

SEQ ID NO: 6524 - protein, 163 aa, Xenorhabdus sp.
MRRILSVLLENESGALSRVVGLFSQRGYNIESLTVAPTEDPTLSRMTIQTKGDAKVLEQIEKQLHKLVDVLRVNELTAGAHVEREIMLVKLQASGYGREEIKRSTDIFRGQIVDVTSSLYTVQLVGTSEKLDAFLDAVREVAEIVEVARSGIVGVARGEKIMR

SEQ ID NO: 6525 - protein, 136 aa, Xenorhabdus sp.
VKLDEIARLAGVSRTTASYVINGKAKQYRVSDKTVEKVMAVVREHNYHPNAVAAGLRAGRTRSIGLVIPDLENTSYTRIANYLERQARQRGYQLLIACSEDQPDNEMRCVEHLLQRQVDAIIVSTALPPEHPFYQR

SEQ ID NO: 6526 - protein, 234 aa, Xenorhabdus sp.
VSLPGRRMENGGLHPVTRTIERIETFFGELGFSVKAGPEIEDDYHNFDALNIPADHPARADHDTFWFDAKRLLRTQTSGVQIRTMKEGQPPIRIIAPGRVYRNDYDQTHTPMFHQIEGLIVDKNISFTNLKGTLHDFLNNFFEEDMQVRFRPSYFPFTEPSAEVDVMGKNGKWLEVLGCGMVHPNVLRNVGIDPEVYSGFAFGMGMERLTMLRYGVTDLRAFFENDLRFLKQFK

SEQ ID NO: 6527 - protein, 795 aa, Xenorhabdus sp.
MKFSELWLREWANPAISSEELSDQITMAGLEVDGVEKVAGQFNGVFVGEVVECAQHPNADKLRVTKVNVGGDRLLDIVCGAPNCRQGLRVAVATVGAVLPGDFKIKAAKLRGEPSEGMLCSLSELGISNDHDGIIELPADAPIGADLRDYMKLDDSAIEISITPNRADCLSIQGVARDVAVINKLSMNEPEIEPVKPATDATFSIRVDAPEACPRYLGRVINNVNVEAETPLWMREKLRRGGVRSIDPVVDVTNYVLLELGQPLHAFDLERLDSSIIVRLAEQGEKLTLLDGNEVELSADTLVIADEKQPLAMAGIFGGEYSGVSTKTQHILLECAFFAPLAITGRARRYGLHTDASHRFERGVDPQLQFKAMEYATQLLVAICGGEAGEIIDVTSESHLPKPATITLTRNKLDRLIGHHIADEQVTDILSRLGCQVTVQNGNWEAVAPSWRFDMQIEEDLVEEVARIYGYNNIPDVPVRADLVMTSHREADLSLKRVKTMLVDKGYQEVITYSFVDPKLQQQLHPQQEALILPNPISADMSAMRLSLLTGLLTTVAYNQNRQQHRVRLFESGLRFVPDESAEYGIRQELMLGGVIAGNRFDEHWSIEKQAVDFFDLKGDLESVLELTGKLSEISFKAEEHPALHPGQSAGIYLGNKYIGYIGVVHPELERKLDLNGRTVVFELLWDKLADRIIPEMKEVSRFPSNRRDIAIVVPENVAAEDILVECKKVGVNHIVGINLFDVYCGKGVAEGYKSLAISLILQDTSRTLEEEEIAATVSKCVAALEQRFQASLRD

SEQ ID NO: 6528 - protein, 98 aa, Xenorhabdus sp.
MALTKAEMSENLFEKLGISKRDAKDLVEMFFEEVRRSLENGEQVKLSGFGNFDLRDKNQRPGRNPKTGEDIPITARRVVTFRPGQKLKSRVEKALPKE

SEQ ID NO: 6529 - protein, 296 aa, Xenorhabdus sp.
AGEIWFWPTQWLSDSAQLFIWQLRLPRALAVFVVGASLAVSGAVMQALFENPLAEPGLLGVSNGAGVVVVFLILIFHGIAPLWLLSAGAVLGALFMTAILLGFAKKHQMTNARLLLIGVAFGVVFGAVITWMVYFSTSLDLRQLMYWMMGSFSGIDWRQIWLVIALCPLILWLSRTGKTLNYLSLGELQAQQLGISHHNWRNLFVTAVGLLVGLSVALAGAISFIGLVIPHILRLIGLTDHKTLLPACTLAGGSCLLLADLFSRLSLSHAEIPIGVVTATLGAPVFIWLLLKAPRI

SEQ ID NO: 6530 - protein, 250 aa, Xenorhabdus sp.
LLVLDNITVNNRLNSLSASVKAGEKVHLVGLNGSGKSTLLAAIAGILPHDGTIHLNGKKLSDYRQRELAQYRAWFSQSVSAPAMPVFQYLDMYRPESASLSEGEQVLHEICQQLKLTALLASTIGQLSGGEWQRVRLAGTFLQVWPELNPVGKLLLLDEPTNNLDITQQAILDKLINQFCVLGGTVLLSSHDLNHTYEQADNVWLLARGELIMSGRPHNVMNERNLSEIFEINIRHIQNTGYKLWRVDHL

SEQ ID NO: 6531 - protein, 379 aa, Xenorhabdus sp.
MNNFLPFSRPSIVREEVEAVEQVLLSGWITTGPQNQQLEQDFARMFGCRHAIALYSATAGMHLALLALKIGPGDEVITPSQTWVSTINMICLSGAEPVMVDVDRDTLMVSAETVRQAITPKTKAIIPVHYAGAPCDLDALRVVAEEAGIPLIEDAAHAVGTRYKNEWVGERGTAIFSFHAIKNMTCAEGGMFVTDNDELAQKIRSLKFHGLAVDAFDRQLQGRKPQAEVIEPGFKYNLSDIHAAIAVVQLGKLASMNARRRELVARYTAALHDSPLKMLSVPEYEHQHSHHLFMVRVDQKVCGIDRDTFMTRLKERNIGTGLHFRAVHTQKYYRERYPTLSLPESEWNSVTLCSLPLFPDMSNDDVDRVVNAVLEIIAE

SEQ ID NO: 6532 - protein, 321 aa, Xenorhabdus sp.
IRKVSVVIPVYNEEESLPQLLKRTISACQQLNQEYELILVDDGSRDSSAEILTQAADDPESYVIAILLNRNYGQHSAIMAGFHQASGDLVITLDADLQNPPEEIPRLVKVAEEGYDVVGTRRANRQDSWFRKTASKMINAMITKVTGRSMGDYGCMLRAYRRHIVRAMLQCHERSTFIPILANTFARRTTEIDVTHAEREFGDSKYSFMKLINLMYDLLTCLTTAPLRLLSVVGSIIAVTGFLLAVLLIALRLIFGAIWAAEGVFTLFAILFMFIGAQFVAMGLLGEYIGRIYNDVRARPRYFIQKVVGDKKTNDNQEEKE

SEQ ID NO: 6533 - protein, 662 aa, Xenorhabdus sp.
VIFAYHDIGCAGLNALVKAGFDIRVIFTHVDDPNENNFFSSVARAGADLGLSVFAPENVNHPLWVEHIREMQPDIIFSFYYRDMLSQDILSLAKKGAFNLHGSLLPKYRGRAPVNWAILNGETETGVTLHKMSAKADAGDVVAQQAVQIEKTDTSLIVHGKIREAATELLNDILPRFKADNYLSIPQDESQATYFGRRTAEDGEIFWHKSAEEINNLVRAVTEPYPGAFTFLGERKITIWRSVPLNTTHDKQAGTVLSIDPLVVACGIGALEIVSGQSESGIYVQGSRLAQEMGIVTGIQVGQKATAQIPRRKRVLILGVNGFIGNHLTERLLNDGSYDVYGMDIGSSAIERFIGNPHFHFIEGDVSIHTEWIEYHIKKCDVILPLVAIATPIEYTRNPLRVFELDFEENLKIVRYCVKYNKRIIFPSTSEVYGMCDDKEFDEDTSRLIVGPINKQRWIYSVSKQLLDRVIWAYGEKEGLKFTLFRPFNWMGPRLDNLNSARIGSSRAITQLILNLVEGSPIKLVDGGEQKRCFTDIHDGIEALFRIIENKNGLCDGRIINIGNPTNEASIRQLAEILLNSFEKHELRGNFPPFAGFKKIESSSYYGQGYQDVEHRKPSIKNAERLLGWKPTIGMEQTIDETLDFFLRDAVQELKRKKQHTG

SEQ ID NO: 6534 - protein, 298 aa, Xenorhabdus sp.
MMQKVGLRIDVDTYQGTKEGVPRLLKILQRHYIQASFFFSVGPDNMGRHLWRLLKPKFLWKMLRSNAVSLYGPDILLAGTAWPGKKIAKDLGYLMKQTIEEGHEVGLHAWDHQSWQAKVGRWSGPELAEQIRLGVDALKKETGQAVSCSAVAGWRANERVLVAKQQFGFDYNSDCRGTHPFRPLLPDGSLGTVQIPVTLPTYDEVIGTQVSDINFNHFILDAIQNAHGVPVYTIHAEVEGMSKSSQFEALLDMLHQQDIQFCKLGHLLPENPETLPVGRIVRSDFPGREGWLGCQQEV

SEQ ID NO: 6535 - protein, 537 aa, Xenorhabdus sp.
FFIFTYLIPLNGRLLWQPDETRYAEISRDMLQRGDWIVPYFLDIRYFEKPVAGYWINSISQWIFGDSNFAVRFGSVFSIMLSAFLLYRLAMMMWQCRQTASISCLIYISMFIVFSVGTYSVLDPMFSLWVTAGIVSCYWALKASSTRERVFAWFVLGITCGMAFMTKGFLALVLPVISMIPVTIYQKRFLEMLRFGPIAIIGAVLISLPWVIAVAVREPDYWHYFFWIEHIQRFASENAQHASPFWFYLPIVILGVIPWLGLLPGALFTGWKAKKNHPEMFFLLCWFCIPLIFFSISRGKLLTYILPCMGPLALMMAKYAVDSMRNGKIKALKLNGLVNVFIGLIAILALVFLEIFSKNPLYQSNELHKWVLGILTFAVWGIVGYFCFRHNGKHWQWAAACSIMLSLSIGSALPDKTINSKLPQDFIRQNEKELAESKYILSVSVGVGAALAWELKRNDIYLFQNKGELAYGLDYPDSQNRYITLEQFPAWLTSARKEGQVAVVFLLSSKGKLPELPKPDLVQRKSRFVLVIYKKQP

SEQ ID NO: 6536 - protein, 144 aa, Xenorhabdus sp.
GCSNHIPQSQLPPSRAALSDPIMVIAKLKEQLEQWQGTPYRYGGMDRRGVDCSGFVYRTFHDRFNILLPRTTNQQTQLGTRISKKDLMPGDLVFFKTGSGANGLHVGIYDINNEFIHVSTSNGVMRSSLDNVYWQRVFWQARRI

SEQ ID NO: 6537 - protein, 329 aa, Xenorhabdus sp.
DSYDPWFNLAVEECIFRQMSPEQSVLFLWRNANTVVIGRAQNPWKECNTRSMEQDGVKLARRSSGGGAVFHDLGNTCFTFMAGKPAYNKEVSTQIILDGLKKSGIHAMVSGRNDLVLSSPEGERKISGSAYRETKDRGFHHGTLLINADLNRLADYLNPDPKKLQAKGITSVRSRVANLSDLLPDITHEKICAGITDAFFEYFGEVVEPEIISPQALPDLPGFVDVFKKQSSWEWNFGQAPAFSHTLDIRFSWGGIELHVDIEHGIISRCQIFTDSLEPAPFEVLAEKLTGVLYQPEAVEQIILAIREQYPLLDAELQQFSYWLVNELK

SEQ ID NO: 6538 - protein, 121 aa, Xenorhabdus sp.
MLESVINDIVKWLENQLQLTEGIKIDAIAHKSGYSKWHLQRIFKELKGCTLGQYVRRRRLHEAAKSLHEDDLPILDIALQYGFSSQATFTRIFKKHFNTTPAKFRENGKLPELKTFLFCEE

SEQ ID NO: 6539 - protein, 819 aa, Xenorhabdus sp.
MRVLKFGGTSVANYQRVLSVADIAESELPLGQVALVLSAPAKITNHLVAMVAKTVAGQDIVSNISDTIQIFTDLLSGLKEHQPNFDYENLKTLMEREFAHLKQTLHGISLLKQCPDSINASLICCGEKLSIAIMAAVLQARGHKVSVIDPVQNLLAHGHYLESTVDIHESSKRIAALNIPSDHIILMAGFTAGNDNSELVVLGRNGSDYSAAVLAACLRADCCEIWTDVDGVYTCDPRSVADARLLKSLSYQEAMELSYFGAKVLHPRTIAPIAQFQIPCLIKNTVNPDAPGTFIGNGQKDDSMLIKGITNLNHMAMINVSGPGMKGMVGMAARVFAVMSRSGISVVLITQSSSEYSISFCVPQKELNRAQKALTEEFYLELKDGALDPIDVIDNLAIISVVGDGMRTQRGISARFFSALTRANINIIALAQGSSERSISAVIDNDNATTAVRLCHQMLFNTAQVVEVFVVGVGGVGNALIEQIRRQQSWLKQKHIDLRVCGIANSRAMLTDMQGISLDNWQQALSEASEPFSLSRLIRLEKEYHLLNPVIVDCTSNQSIAEQYSSFLSDGFNVVTPNKKANTLSMAYYREIRRAAENSKRKFLYDTNVGAGLPVIENLQNLLNAGDELVQFNGILSGSLSYIFGMLDEGMTLSQATLLAKEKGFTEPDPRDDLSGMDVARKLLILARESGYELELEDIHVEPVLPASFDSNGDVTDFLQRLPQLDQEFIRRVADAAEQGKVLRYVGIIEQGRCMVKIAAVDGNDPLYKVKNGENALAFYTRYYQPIPLVLRGYGAGNDVTAAGVFADILRTLSWKLGV

SEQ ID NO: 6540 - protein, 314 aa, Xenorhabdus sp.
MVRVYAPASIGNVGVGFDVLGAAVSPVDGSLLGDCVSVKAAEKFTLSNEGKFVSKLPGNPKHNIVYQCWQLFCQRLGKELPVAMTLEKNMPIGSGLGSSACSVVAALVALNEYAGHPFGRDQLLEMMGELEGRISGGVHYDNVAPCYLGGLQLIMAQEVMPQGDAVCQSIPAFEDWLWVMAYPGIKVSTSEARAILPAHYSRSDIINHGRYFAGFIHACHTRQSRLAANLMKDIVGEPYRTQLLPGFANAREGVKKRGALACSISGSGPTLFAICNEMAIAEEVAQWLQQHYVQNDEGFVHICRLDLAGARQIG

SEQ ID NO: 6541 - protein, 317 aa, Xenorhabdus sp.
MTDKLTSLRKLTTVVADTGDIAAMKLYQPQDATTNPSLILNAAQIPKYRQLIDDAIEWARAQSDSREQQIIDAGDKLAVNIGLEILKLIPGRISTEVDARLSYDTEASVAKAKRLIKLYNEAGISNDRILIKLASTWQGIRAAEQLEKEGINCNLTLLFSFAQARACAEAGVFLISPFVGRILDWYKANSDKKEFAPNEDPGVISVSEIYQYYKEHGYNTVVMGASFRNSGEILELAGCDRLTISPALLKELSETAGEVEHKLSYEGEIKPRPAAMTEAEFYWEHHQDAMATEKLAEGIRKFAIDQGKLESMIADLL

SEQ ID NO: 6542 - protein, 191 aa, Xenorhabdus sp.
MNVLRIGLVSVSDRASNGIYQDKGLPALEEWLGKTVTTPFSIEARLIPDEQILIEQTLCELVDELGCHLVLTTGGTGPARRDVTPDATLAVADREMPGFGEQMRQISLQFVPTAILSRQVGVIRNQALILNLPGQPKAIAETLEGLKDDSGKVLVPGIFASVPYCIQLLDGPYIETNESIVSAFRPKSARR

SEQ ID NO: 6543 - protein, 215 aa, Xenorhabdus sp.
MSMFDKQILVEIAEIAKVLGNVHRLTLLECLMSSEQSVECLSELSGLSIANTSQHLQHLKRSGILQSRKVGKHVFYRLGDGPVMDIITAIQKYAEFNRAEMRRLIDDMDNQEAISWDELLDRIKEKSTILLDVRPKEEFNQGHLPNAVNIPIDELESRLDELTSNSNLIAYCRGPYCVLSANALELLRAKGIRARHFKKGFSGWKDAGMDVESIS

SEQ ID NO: 6544 - protein, 258 aa, Xenorhabdus sp.
MLITISPAKTLDYESPLATKKYSQPALLEESKQLIDVCRTLTPAQISSLMGISDKLAGLNAARFGEWQPDFTPENARQAILAFKGDVYTGMQAETFSDADFDFAQTHLRMLSGLYGVLRPLDLMQPYRLEMGIKLENPRGKDLYKFWGDRITENLNAALEQQGDDVLINLSSDEYFKSVNTKKLAARIIKPVFLDEKNGKYKVISFYAKKARGLMSRFIIQNQLTDPARLVEFNLEGYAFDESLSKENELVFKRSEQH

SEQ ID NO: 6545 - protein, 464 aa, Xenorhabdus sp.
MKQFPTHFLWGGAIAANQVEGAYLADGKGLSTSDVQPQGIMGPVIERESESTQYLKDIAIDFYHRYPGDIALFAEMGFTCLRTSIAWSRIFPQGDEMQANEAGLAFYDRLFDEMAKYGIQPVITLSHYEMPWALVKKHGGWGNRKLIDFFERYARTVFTRYQKKVKLWLTFNEINMSLHEPLTGVGLPKNSTQSEIYQAIHHQLVASARAVKLCHEIIPDARIGNMLLGGLMYPLTCKPDDVLATLRQNQKWLFFGDVQVRGAYPGYMLRYFREHGIEVTITEQDKLEMQNTVDFISFSYYMSGCTSGNEADYQKKQGNILNMIPNPHLASSEWGWQIDPVGLRTLLNLLWDRYQKPLFIVENGLGAKDTVEADGTIQDDYRISYLNDHLVQVREAIEDGVDVMGYTSWGAIDLVSASKGEISKRYGYIYVDQNEQGTGTLERRRKKSFYWYKQVIETGGGSLI

SEQ ID NO: 6546 - protein, 473 aa, Xenorhabdus sp.
MKYQLLAQEIIADVGGQGNIISLIHCATRLRFKLRNSALANIDKLKAQSGIITVIESGGQFQVVIGNQVGDVYQAVQQELTSAEQTSDTAELPNSANNKKDSLFNQFIDVVSGIFTPFLGVMAAAGILKGLLAVAVTLKWMSLDSGTYHVWYAASDSLFYFFPLLLGYTAGKKFGGNPFITMAIGGALVHPMIISAFKASTSAGSTTEYFIGIPLSFLNYSASVIPIIFASWVSCKVERKLNDHIPATIKGFVTPLICLILIVPLVFLVIGPMATWLSQLLAGGYQAVYGVAPALAGAIMGAVWQVFVIFGLHWGFVPLAINNLAVLGHDTLTPLLLPAVIGQTGAAFGVFLRTRDAKLKMLAGSAATSGMFGITEPAVYGVTLPYRRPFIFGCVAGAIGGSVVGYYQGAIYSAGLVNIFTFTQMIPPTGINNTVWGAMIGTALAFIISTVLTWLFGLPISSNSLLRPSTKES

SEQ ID NO: 6547 - protein, 70 aa, Xenorhabdus sp.
VENELHWVLDVAFREDNISLKDPDGAAQMALFNRIALNVIKQNTSIKDSQAAKRRRATWSGEFRSQLIFD

SEQ ID NO: 6548 - protein, 175 aa, Xenorhabdus sp.
VIDDDGYRPNVGIVICNRQGQVLWARRYGQHSWQFPQGGINPGESPEQAMYRELFEEVGLSRKDVRVLASTRSWLRYKLPKRLVRWDTKPVCIGQKQRWFLLQLLCSEKEINVQRSSTPEFDGWRWVSYWYPVRQVVSFKRDVYRRVMKEFSSIVMPVQESAPQPYSAYYRRRRS

SEQ ID NO: 6549 - protein, 339 aa, Xenorhabdus sp.
MLMRLREIVEKVAMATNLSEALELLVNETCLAMNTDVCSIYLADHQRQRYYLMATRGLKKPGKRTVSLSFDEGVVGEVGRLSELINLADVRDHPSFKYIPQVKEENLRAFLGVPIIYRRQLQGILVVQQNERRSFDESEESFMVTLAMQLAAILAQAQVRGLTSQYCQTHIKALAVSQGIAMAQGWQDCSQPSLEQVSEALTLDYQAERSRLTRALEQATAECRRISKRFTASSQKESAAIFDLYSHLLNDPKLKQDLFHSVDNGFIAEWAVKSVVEKYAEQFANLQDAYMRERASDLRALGQRLLFHLDDDFTGNSQWPERFIFPYERLKPPTLVGQL

SEQ ID NO: 6550 - protein, 231 aa, Xenorhabdus sp.
MIKLENVTYTYEQISMHFNVSIEAGERIAILGPSGAGKSTLLSLIAGFQFAERGDIRLNGENHTNTSPSNRPVSMLFQENNLFSHLTIEQNIGLGLHPGLKLSVQQQQTLQQIASQVSLTEYLNRLPAQLSGGQRQRAALARCLVRQQPILLLDEPFSALDPALRNEMLELLDQVCRDRKLTLLMVSHNLDDAAKIAPRSLLIVDGEIYYDGATEKLVKGEVTEAGVLGII

SEQ ID NO: 6551 - protein, 437 aa, Xenorhabdus sp.
MTLVLPVLVALFGILTVYGRVGWLASLCQWIGIEYHFTPYGLQGILLAHIFFNMPMATRLLLQSLENIAIEQRQLAAQLGMNEWQHFRFVEWPYLRRQILPTGALIFMLCFASFATVLTLGGGPSATTIELSIYQAIKYDYDLGQAALLALIQLFCCLGLVLLSQKLKGILSVGYGHQQQWRNPQDSWPKKLCDGLLITLALLLLLPPLLAVIMDGLNSAVLDVLSKPELWQAFTTSIVIALGAGLLCIFLTMMLLWSSRELYLRHLSRWGQALESSGLLILAMPGIVLATGFFILLNNTIGLPDSPYGLVILTNALIAIPYALKVLDNPMRDLAVRYNPLCHSLNIKGFNRLRWIELKALKIPLAQALAFASVLSIGDFGIVALFGDENFRTLPFYLYQQIGAYRSQDGAVTAFLLLFLCFILFSVLERLPGRRHD

SEQ ID NO: 6552 - protein, 309 aa, Xenorhabdus sp.
KPTLTVYTYDSFASEWGAGPAIKKAFESECDCELKLVALEDGVSLLNRIRMEGKKTQADIVLGLDNNLIQSAQQTGLFTPVSIDTTKLKLPFTWNNSTFIPYDYGYFAFIYNKNTLPNPPKNMAELINSQQNWKIIYQDPRTSTPGLGFLLWIQELYGDKAAQEWQNIAKKTLTVTKGWSEAYGLFLKGEGDMVLSYTTSPGYHIMSEKKDNYAAAIFDEGHYLQVEVAAQLASSKQPELAQKFMQFMLSPAFQQVLPTTQWMYPVTDIPLPEVFKQLPVPEKSLQFNADEVAKHRTQWIRTWQSAVSR

SEQ ID NO: 6553 - protein, 112 aa, Xenorhabdus sp.
MAVNQTKIFDTLEEIVFSLNQDEFIYSFLSAYNLPKSTITQLQQGGSRNIAKENSHIGLKNKIYFEPAHSDDDLDEKLSLRLTDQLITKTQQPPTKVGGLVINGLKVRIRID

SEQ ID NO: 6554 - protein, 88 aa, Xenorhabdus sp.
MNNNIRTDWHQADIIAALRKRGTTLAAVSREAGLSSSTLANAFSRPWPKGEWIIANYLGIHPSEIWPSRYFDSYGRLVERKARNKTQE

SEQ ID NO: 6555 - protein, 208 aa, Xenorhabdus sp.
MAGREKLETSPRLSNQALGLSGTSRAGTKQAIPDATFQVVYQKALERDIGFAVTLELARLLGLRSQEAVQCSASLKSWRKQLNQPEPKLQIIFGTKGGRARQTRVLDIAAVKKAVEQAIVIAEQRGGRLIDKPDLRQAMNYWRAHTTKIGLIGCHSPHSLRYAWAQDALNFYQQNGFSHQEARALVSMDMGHGDGRGRYVERVYSRST

SEQ ID NO: 6556 - protein, 57 aa, Xenorhabdus sp.
VLHGGGIDIKGIAINLNSGGSPGDLLAPANPAILLAAASEGSMFVAHCPMKDKENQE

SEQ ID NO: 6557 - protein, 1905 aa, Xenorhabdus sp.
PGRDLSYAPLFHVMLAFDSSDSAGWQLDGIKTTPFTVAGDYAKFDLTLSMEKVLQADGREQLQGTFEYSTDLFDEATIKQIEANFCFLLQEIARNAHAALTEYQCINEAEKQWLLQEWPRSLNTHPVTQTLHQAFEQQVIRRPQAIALSTDNGKTLTYEQLNQRANQLAHYMLKIRQQTEGTTALTPLIGLCLERDEEMLVAILAVLKAGLAYVPIDGSHAPERVRFYVEDAGIQLVIGTPVYRTLFDHEKVDYLCIDSEKTFIQTMPLDNPDMACQPDALAYVIYTSGSTGVPKGVEIPHANVMRLFSASQRHFTFSENDVWTLFHSCAFDFSVWEIWGALLHGGRLSIVPYWTSRTPGHFYQWVQQEKVTVLNQTPSAFQLFMAADEQLNKEDKNGINSSLSLRYVILGGEALEPANLLGWFKKHGDELPEIINMYGITETTVHVTYRRIRQADALQGGKSPIGEALDDLEIFLLDGQGRLSPLGAVGEIYVGGAGVARGYLNRPELTAQRFVDKRQFFPQAEAGQRLYRSGDLARLRRDGALEYLGRADHQVKIRGFRIELGEIETALKRIDEIEQVVVMAYQNEGEHTSHLVAYIVPTGTGSDEALSVDMLRAELKRTLPDYMLPSAFIFLDALPLTSNGKIDRKALPAPQQVRPQLASEYREARNETERELLKLWRETLPVSRIGIHDNFFALGGDSLRGVQLTGKAQEQGWLLTLADLFQHQTVAELATLIDERRKEHQLSAQSIAPFSLISEKDRLHLQAQAQTQERTQKIVDAYPLSRMQAGMFYHMNMSPDANVYHCTGTSHLRINGAFNEQAFREATAQTVAAHDVLRTAFDMENYSEPLQLVYDFAELPIVVEDLRHLSEQEQDVRAKALLEAERVNPFDLLNPTLLRFFIQLRTDNSFQFTMTECHPVFDGWSYNTMIVEVFNRYATLTGQTSWQAPDKKSLEYRDFIALERAAIADEQQKNYWAQKLDDCTILELPRKQHTEGIQSANPPATSPKLKSVSLTLDSTVYQGLRHLMLQLGVPLKSVLLAGHIKVISIFSGENDILTGISANGRPEAQGGEHLYGLFLNILPFRQILTSVSWNELIRQVFANEIEAIPHRRYPLAEIQRQFGQQPLLDEVLFNYIDFHVYGQMAAEVGLEVVDRLHTQDVYEGTHFTLDVHFQHLTLSSALASDQISIQLDYDENKISRGLVSTMAECYSAVFAAMVADPQALHCADHFLPMVQQQKLENFSQGDAGYQGPETLAGLFAEQVAQTPSVLAVEFGERRLSYLELHQQSNQLAHLLAEKGVKQGQYVALLLGRSVELIVSMLALVKLGAVYLPLNTDDPDIRLIEQIEDAQCDLLIIDRRVTDRQLPDTMSDLPPVLWLDEEQSALAQMPVTDLPDCLNSHPEHQGGLPAYIMYTSGSTGKPKGVLIGQKGIIRLVKNVSYVDFRAFKRYLQLASVSFDASTWEIWGPLLNGSSIVIFPQGVVSVLLLEKIIKESQIESLFLTASLLNLIVDERPQILQPVKQLISGGEAMSSWHAARIKERYPELILINGYGPTENTTFTTSYRYRGTEGHSVPIGRPNEGNQVYILDSFLHPVPVGTAGELYVGGEGLAMAYLNQESIYQTLFIENPFDKSLSARLYKTGDRGRFLPDGNIEYLGRIDDQNKIRGYRVETGEIEAVLCKHPDVERAAVRVIEENRGKRIAAYIVLHVGQALNTMELRNYLAERLPRYMIPAYFQALSSLPLNANGKLDIARLPQDIPQQAAYHELSNVSPLAEAVPAVAEEKTNVLTDPVVLAIQQVWAEVLDMESPGCNQNFFDLGGDSLLLARVHLKLHALGHTRLSIIDLLNYSTIHQLARFINGGHGQSENAGTSAVMQRTQGAKETSLNNITDGRQRLAEMQKKMQQKR

SEQ ID NO: 6558 - protein, 1610 aa, Xenorhabdus sp.
MNNTDGNNVQREQAVESVSDLEMHGFEIAIIGMAGQFSGASDVEQFWQNIAAGVESVRPLTDAELDAEGISMEARSRADFIRNVSVLEHPEDFDAEFFGYSPREAQAIDPQQRLFLETSWLALENAGYTAEKFQGPIGVYASSSSSSYFMNYLLNHHTAEGPYLPDMLLFGNNNDLLSTRVSYKLNLRGPSFTIGSACSSSMVALHYACQSLLAGECDIALGGGVHVGFPSHSGYHFEGSGILSHDGHCRTFDAEASGTLSGDGVGVVVLKRLQDALDSGDHIYAIIKGSAVNNDGAEKIGFTAPSVAGQAAVLQRALLVADVTPESISYVEAHGTATHLGDPMEMKALLSAYEQPETEQPRCAVASVKANLGHVDSAAGVTGVMKVAQMMMHRYLPPAVNFTRLNPEINLTGSRFYIPTKGEAWQCQGVRRAGVSSFGIGGTNAHMILQETPDTSPSGPSHPQQLLSFSAKTPQALQAKLLNFRDWLEKSPRLPLADIAYTLHVGRHEMDYRHSLVCHDHISAIAALDNYLSRTAQENTLRTVASSVIFMFSGQGAQYPGMMKGYYEQEPIFRAAVDKCAEMMLPLLGRDIRPLIFDTTEANKTPALYQTHYTQPALFVVEYALSQLLIEWGIRPTACIGHSIGEYVAACIAGVFTLEDAVKIVIRRANLMNQMPAGKMLAVELNERTLQGYLTEGVTLAAYNAPELCVVSGETEAILMLEARLAEDNIESGTLHTSHAFHSAMMDGCLEPFRQAFDGITLSAPELPFISCVTGTWITAEQAMSPDYWVRQLREPVAFSQGVACLLSQQEVTSGSHLPQTHIQQSHSQKASPSKAPVLLEIGPGSALTGLAKIQFTGSAAHQRVFNSTRSIKQTIPDRQHLLNLLGQLWQQGVSVDWSAFYQLQKRHRLPLPGYTFQRQRYSLDSWVSDTSRNMPSHTRQTASDNGRLPLEQWSHQIRWKQMTIPVADYARLNGQVFLIFMDGSGVGKQLTAELTQLGGEVWQVIQGGRFKADTNTRQVIINPQNSEDYQALADLFNSRKVKVTNIIHAWSITRSASIALNTAFTHYESLLHIARQFAVDRLATDGMGSANQLKTVALKIDILSNRLHSITEQDRNDPAKALLMGPCRVIPKEFEQVQCRSIDIALPVRWSLPLLNPKPSDAVISALLTEILRQPEEQESQDNIVALRGRHRYVPLTETAVLPATASPLLRHGGNYLITGGFGGIGATIALYLAKHYQSHLIFISRSELPPSNEWSDWLETHDADNKRSRHIRLLQQLKQMGASVSVISADLADASRVNKALTDVVLQYGQIHGIFHCAGIADGGLIQNRKFEDSLQVFQSKVLGTQVLDNWFKRRPLDFFVLSSSLASHIGTIGQVAYCAANAFEDAYALSRHQHVLDEKHFNKSHSGTKKSTRYLAIGWDAWREVGMAVDSLRQWYQDNEEQESIRHGILPEEGCQLLELLLSHGDSVYAVSTRGLPLPDTDHTVENNIPAEQDQNTVNTGEQNLYPRPVLSVAYQAPRNQTEEIIADIWQEKMGIGPLGVFDDFFELNGHSLMAVQIIAKIKQRLQVVFPVGFIYEHSTIEQLAEQVNLGNKVQPDNLTGNPEERR

SEQ ID NO: 6559 - protein, 121 aa, Xenorhabdus sp.
MLRFIETDLIRYLLGTVVLFVVGFIALLLTTMLLRPLQPKLAKLNRSNSIDNLIGKIAEVRSPIVTEQRGEALMNNNGASLILQIRAPESDGIARGDHVVLISYDATTNSYTVVSENEFRL

SEQ ID NO: 6560 - protein, 743 aa, Xenorhabdus sp.
MSDINLADFMPFLIIIATIIIVILGFFGLFKAFYIKVPQGTALIVNDMSAQPKVHFTGALVYPVIYKKEFMRISLLTLEVDRRGKDGLICKDNLRADITVAFYLRVNETTEDVLKVAKSIGVERASDHNAVNALFSAKFSEALKTVGKQFELSKLFEDRQNFRDRIVDVIGKDLNGYALEDVAIDYLEQTPKNSLDPNNIFDAEGIRKITEITAIHNIETNQKERDQELAIQKKNVETREASLALERQQADAEARQKREIESIRARETAETLKVKEEERLKAEQARIQTQQEIEIREENRLREVEVAQQNRERAVIIEMEKVTRAQELEIVSREREVELQRIEKEKALEEERKNISNVIRERVAVEKTVAQEEERIKEVRMISEADRKKQITIIDAQAKAEQELVRQVKQAEADENSAKYKALEISTMAQAELEAAAKQSEAKKRMAEGIEAEEAALGLAEARIRQAKAEAEEKEGLVQANIIAEKLLAEARGTQEKGLAEARVMEAQADASEKQGLAEAKVLEEKLSAQARGDEQQAHAKEKLGLVDAKVLEEKLTAQARGEGQLGTAQAEVIRQRLKAEADGLTDKFTAMGNLNDTARDHEEFRMRLEKDFEQAMSAIAANKEIAKEQAEVLAAALSKTNIDIVGGDGSFFNTFSKALTVGKAINGVVDKSPLVKSAVDKLLTGKGDKGIVEKFMEKEVGEKKLDFNSLLQNPEVQSLVNMFSGSQKDQTPKSPNKDNSEE

SEQ ID NO: 6561 - protein, 1656 aa, Xenorhabdus sp.
MSDSQLNDNQVNTREQELLNNAVAEGGAYDILRNRLSEQGQQLHEKVSLLNNRRLAEFGKNQTDIIGRIRIRTENNCVARDIVRVGDWLLLGYNVFLGLKKETRVEDVFSLYKLKKENDEYDVESVPLTGTFLNITSFVQDFHELYTYYKNTQLLELVERDGKLLASFQIGERITDIRVFRWAISSDKTEIRYIDNRGERDIALPPAYDFEWQRTTRENTVHGRYPHMNILDTVFVETIGGELTIKCENNTEDGLGIYREAVLDKTQSLDDAQIEYAQTGSLVLLKILPYREDTWRYLVYNTLTQTVQRIDAIGLACIQLPEDHGIIFPGGYYLQNGEYKTFDQPMDGMRFRRVRRSPNGEDVMYIFYEPKFGRLALFNYNLIERKLQNPLFGHGYAMLEDGQMVLFEGQSDEPTRIHPMQIWQTPFYSDEYAARQPAKNSFLGRIGNAELVRGISDLYHIAKEIEQQQISSQLYEKLCQDTRRLVDIYYWLSDEKWQSDEQSLHIAALLKEIANTGERVLDEYEKVESIRRQSVRAMNEATSHQKELLTAMLPESWTETQQYIDALNKLSIQRGHLITLRDHRYIDLVRLDEMEAQLADSQQRISLATADFLASDKALQPFTQQLQILDKQIQEAANSAQLTEPLAGMEKMSADLDMLSNLMASLKFEDTTQQTHIIESISEIYALLNQAKARLQQRRKEKGAVESVAQFSAQFKLFSQGITNALTLSTDPERCEEQLSRLLVQLEELESQFSDHDEFLNDILDKREELLETFETHKQSLLDERQRKTQNLQVAAERLLDSINRRTTKFSSLDELNAFFAADTLSLKAREIIGRLRELKDSVKADDIDAKFRAARDQAIRSLRDKKDIYEDGGNIIKLGPRHRFSVNTQELDLTILPRGDKLYLHLTGTDYQEPINSPELESLKPYWAISLESESPSVYRAEYLAYSLIYAASKEQAGLTLDGLKSLISQPDMLEKTVRDFAAPRYKEGYEKGIHDHDAIAILRKLIPVGESADLLRFNPHARAIAFLFWDQVQQEEQPSLWPERARTCTNIYQLFRNDAGLQDLEAEIEAEISLFLERNPIRCEPYQQTQAAEYLCLALSRMTVEFTFSKYARALLEGLQSALEKAHMWGDFIHSQQNLGQRFAQRWTLVENWLNGLCSLAEFAPLKDYISEAVALTVLDKSLNARFSEVDLHFTVTNLIGEHPSIINQTLTLSLDDYFCRMRKQRKIFIPAYHHYQELRQSVLNQQRQSLKLHEFKARPLSSFVRNKLINDVYLPLIGDNLAKQMGAVGEGKRTDLMGMLLMISPPGYGKTTLMEYIANRLGLIFMKINAPALGHDVLSLDPAQAPNATARQELEKLNLALEMGNNVMLYIDDIQHTNPEFLQKFISLCDGTRRIEGVWKGKTKTYDMRGKKFCVVMSGNPYTESGELFKIPDMLANRADIYNLGEVLGGMEEAFTLSYIENSLTSNPVLAPLALRDMNDLYLFIDKAMGKPFSGNALSYPYSDAEITEIVAILERLLIMRSVVFKVNQQYIASAAQSDKYRTEPPFKLQGSYRNMNKLSEKVSAVMNEAEIQRILDDHYLGEAQLLTSGAEENLLKLAELRGTLTPEQELRWQQIKRDFIRNKALGGDNADVGDRVVAQLADLVESVQALGN

SEQ ID NO: 6562 - protein, 164 aa, Xenorhabdus sp.
GALSNFGIIPRYIQGLIGIPLSPFLHGSWSHLFSNLPALLILSALLMAHSIRYYILASLFIIFTAGMLVWLFGRSAIHVGASGWIFGLWGLLLANAFFLKRAKDFFFAIVVFIYYGGIAINLFPWHAYVSTESHFFGAISGITFSWLSKKQLIKKHKDNLITRR

SEQ ID NO: 6563 - protein, 124 aa, Xenorhabdus sp.
FGHLTDPRLNRTKQHLLIDILTISICAVICGCESFNAIEEYGKSKEDWFRQFLELPNGIPSHDTFNDVINRLNPQQFGEAFIGWVNKLAKISTDIIALDGKTMRGTLDKANGSPDIHLVRAWAV

SEQ ID NO: 6564 - protein, 339 aa, Xenorhabdus sp.
MMKNVGFIGWRGMVGSVLMQRMIEEGDFNEINPVFFTTSQHGQAAPEFTGKSGVLQDAFDIEALKALDIIISCQGGDYTNNIYPKLRATGWQGYWIDAASALRMNDDAVIILDPVNHQHIQDSLNNGIKTFVGGNCTVSLMLMSLGGLFANNLIEWASVSTYQAASGGGARHMRELLTQMGMLHNQVADELQNPASAILDIEKRVTDFTRSGTLPTDQFGVPLAGSLIPWIDKQLENGQSREEWKGQAETNKILNTGNNIITVDGLCVRVGALRCHSQSFTLKLKRDIPIHEIETLLASHNEWVRVIPNDRELTMRELTPAAVTGTLNTPVGRLRKLNC

SEQ ID NO: 6565 - protein, 183 aa, Xenorhabdus sp.
MGRRKTIDRNILLDAAEQIVTTHGAAALTIDAVAKAVGITKGGVQYSFNTKDALIEAMFERWGLGYEEQFYKIAGEAPDPLTAIRAHIEASKCSDEVSSAKAAGLMASLLQTPEHLESTRDWYRERIANLDITTAEGRRARLAFLATEGVFILRFFGLMDIGKDEWADIFSDILEMAPSENSE

SEQ ID NO: 6566 - protein, 444 aa, Xenorhabdus sp.
MSTLNSGSANSQGLLQRVFKLEEHGTTVRTEMIAGLTTFLTMVYIVFVNPQILSVAGMDIKAVFVTTCLIAALGSIMMGIVANLPVAVAPAMGLNAFFAFVVVGAMGVSWQVAMGAIFWGAVGLLILTIFRIRYWMIANIPVGLRVGITSGIGLFIAMMGLKNAGIIVPNPDTIVSIGNFTAHNVLLGALGFFIIAILAARNFHAAVLLSIVITTGIGFMLGYVEYQGIFDLPPSVMSVVGHVDVKGALDIALVGVIFSFMLVNLFDSSGTLIGVTDKAGLADSNGKFPQMKQALYVDSISSVAGSYIGTSSVTAFVESSSGVSVGGRTGLTAVVVGILFLLVMFISPLASMVPAYATAGALVYVGVLMTSSLTRVKWDDLTESVPAFITAVMMPFSFSITEGIALGFMAYCVMKLGTGKWREIGPCVIVVTLLFVLKIVFVDA

SEQ ID NO: 6567 - protein, 198 aa, Xenorhabdus sp.
VNDIGCYMWILLDSAENILITRVESHAMNQLKKKSPARASAGKHKRKSREELNAEGRERKRQKKHRGNPSGNRHQESNQKKQTGAKQEKDPRIGSKVAVPLIVGEKAAVKPVVKQPKAPEKPRLSAREELEMLENDERLDDLLARLEQGENLSEEDNVYVDKMLDRIDVLMEELGIDLEEDDSEEEKQDDIMQLLKGK

SEQ ID NO: 6568 - protein, 459 aa, Xenorhabdus sp.
ISMSEQAIVWDLPLIQKYNYSGPRYTSYPTALEFNQQYDNAAFIQAAARYPDRPLSLYIHIPFCHKLCYFCGCNKLVTRQKHKADDYLAVLEQEITTRAKLFTHRKVSQMHWGGGTPTYLDKMQISRLMSMLRSHFCFLPDAEISIEIDPREIELNVIDHLRNEGFNRLSMGVQDFNKEVQCLVNREQDEDFIFELVNRARETGFTSTSIDLIYGLPKQTPESFAFTLQRVLALSPDRLSVFNYAHMPNLFAAQRKIKESDLPSAAQKLDILQQTTATLTGNGYQFIGMDHFARPDDELAIAQREGVLHRNFQGYTTQDDCDLLGIGVSAISMLGDCYVQNQKDLKTYYAEVNAQGHALWRGLALTQDDCIRRDVIKALICNFRLNFADIECAYSVSFTDYFAEDLQLLAPLAQDGLVEVSEKQIRVSLKGRLLIRNICMCFDHYLRNQMRQRQFSRVI

SEQ ID NO: 6569 - protein, 108 aa, Xenorhabdus sp.
MSTEMKLNIAELPEELRAVIRQGQAVVIRDGGKEIVEVKAYRRSRGRHVPNIVTKLAKLRVKRPIGGLANPEKQLRPIGVLTGKISVPTEEEFARYDREILSMFEGKE

SEQ ID NO: 6570 - protein, 65 aa, Xenorhabdus sp.
VGFLPLMVTIEHSLSYYELPIVKHRDPFDLMLVAQAKYEGIILVTNDEAILTQFTDFSEYLLSNR

SEQ ID NO: 6571 - protein, 503 aa, Xenorhabdus sp.
TLMSSFMKSNTRWLVLAVISSALLLIVIDMTVLYTALPRLTYDLRASSTEKLWIMNAYSLTIAGLLPGSGALSDRFGAKKLFTAGLAVFGIASMMAAFSPNTSMLISARVILAIGAAMMMPATLAIIRQAFEEPGERALAIGIWSAVAAGGAALGPVIGGILLEYFWWGSVFLINVPIVIIALIFALFTITKSQSNPQRTFDLLASLQIMIGLIGITFAIKEISKQAPSMGIAIIASAIGMIFTMMFVSRQRRSSAPIIDFTLLKSYGFSTGVATAFVSTAALMGVELIVSQRLQLVAGLSPLQAGLIILPIPLASFVAGPLAGLAIPKLGSGRIMWLSLFLAGLGIFGYLIGFRAGMLVQITTFSMIGFGVGAAMTAASTSIMFSAPEHSAGTAASIEEIAYELGGLIGVAVLGSLLVAIYTAAFTLPADIAVSESVSNALQNSIDEAIIVAEGLKGDMASSLLQAAKQAFDSAFLSVLTISGALLLLSAAIIALFTPKKHS

SEQ ID NO: 6572 - protein, 398 aa, Xenorhabdus sp.
MGVWQLALRLTGRIELAWLAMLSLNLSGIINFDIIPYNDNYLLVMLWSWSLLFFLKAIDDHPKWWLAFALATGLATMGKYSSLSIIGSVFLLSLFVPKVRRHYREPLFYLALALWLILVLPNIWWLANNDFSAFKWVGSQIKQGFNLHTTRSLFSVFYPLIIVSAIIYLLGGKIGWPKQQSNQLANIVILLPLLIIYGWFSFNEGGRMTEWLQPFMAVAPALLVGSITVRPHKSLTGTLRGLAVFAVLVLIGYASIMLTNVRGAGEKFAGIKIFSSQPDQRWDELYSTPLHYVGGEYLHQWLTFYSHYHPQTIQPWKTGNGAPPNIYNRHIKESDIVKYGALLVGKRGKNCSQEHFQSTLATWPELILSHKEDFTFQAQPDAESEVVCIGFIAPENRH

SEQ ID NO: 6573 - protein, 450 aa, Xenorhabdus sp.
GMDCVSFENADSVLAALSQNSPEVLLSDIRMPGLDGLSLLNQIRQNHPQLPVIIMTAHSDLDAAVSAYQHGAFDYLPKPFDIDETVALVERALSHSREQQQTSRRPKIASSVSEIIGEAPAMQEVYRIIGRLSRSSISVLINGESGTGKELVAHALHRHSPRAAAPFIALNMAAIPKDLIESELFGHEKGAFTGANQVRQGRFEQANGGSLFLDEIGDMPLDIQTRLLRVLAEGQFYRVGGYAPVKVDVRIIAATHQNLEQRVEEGKFREDLYHRLNVIRLQLPPLRDRVEDIPRIAQHFLQQTAKELGIEAKVLHPDTEKALMNLSWSGNVRQLENVCRWLTVMAVSKEILVQDLPTDLIESQPVEPTDNVPVSGFSSSEEWPQQLATWAENALQAGKADLLSDALPLLERTLLNCALTHTNGHKQEAARLLGWGRNTITRKLKELGLE

SEQ ID NO: 6574 - protein, 457 aa, Xenorhabdus sp.
MKKIKILQGQIGLLAKEGEYLQVLTAGEYRFSDWFNKLQLTTFNLSGGAIEAKLAEHLRQYHADWVEQYCDDIQLAEDEMGLLYEYDLLNEIIPSATRRLYWKNSGLRRCEIRKTTEQEISPELVSLLHAAKTHKRTVKGLDNILIAQIPVWQVGILKIDGTVQELLQPGLYGYWRVGYDISVEIVDTRSQTKVEDNLAEHLRQQHSDWVDEFCDGIEIADDEMGLLYEHAVLVEILPPATRSLHWKNGNPRRIEVLKSSELEADAELVSLLMSAMARKRSVKGADSVLITQIPAWHIGILKVDGIAQELLQPGLKGYWRVGHDVLVEIVDTRLQVLEISGQEILTRDKVNLRINLSANWRYQDVLMAYEQLSDPVSYLYRELQFALREIVGTRSLDELLENKQVIDDLVGEKIQQIALRFGLEVASLGVKDIILPGDMKTILSQVVEAEKSAQDNL

SEQ ID NO: 6575 - protein, 293 aa, Xenorhabdus sp.
MEKKSYEALQNYLPLNSINNNQCTLRNAQKLARTLILFPLLICMFFIFQYCITDFIEQRERGETNLLEWVDLVREEYGDEFYLRKDLPTHMEDARLVGNDKSISFWKYLYYRYNYYHASTRILIKDLLLFGFLLAYSLYLIHRCFFWKLQAPIFIDRERQLFFSWYKGKVYAARYSQVGVSNQTDPMKIIHLMGLAMYTLDENNTLARRAFQMCLSYGSILGFNTKLRQDEAHAFIVKYLIQGKDAVAATDYKRFPALFLFKDKKPADFNEQLEHILAELDKQDIRDNSQENT

SEQ ID NO: 6576 - protein, 1124 aa, Xenorhabdus sp.
MEQPESPPDIHTLMSATTLKQSKGYAARLMRSGWIYIREEDSMEHRPSRTAYFHIFKYEVEKSSDNDDAPRIERFRKYMYRNKKDARDGVMPELGLQGEGYPFLFVAKDVSNISIAYSEHLWHPDVIARMNRDKKLREKTMQFINLDADNQQYAIEATESNFTKLIEDYKTRKEQFSAVKAKIDANKFEELDINDLRIDELTTEKSYEMDAENIAAEIRKKLCYQEKARIVILHDPVGRQKEILEAHNILDLLQQYNAEHNLYPMTIGLYIDDYIKVFNKNDPIAKRANSEVLSRKAVRKYWPKIRDSHLVFEKRQEIFISLFKAFASAPAVTGKVGSLDNYFQHFFSIHEKKEISNESDIQEIYTFVELVFDIFHGLQMSVTSEKMLEELISLAAGKPTTLKDFADTTLGILPYGLYDPNKEAKAKRDAITAAEKNYTPQYSTNAWEIAATGMVKILTHGESKEIAKTIHQSTKNAINKTLENINDPNKPIQQSKKFLNDQIIKISVYVSEKFLELFGKIVGKAFAIMEAGAIAIKGPLTHLSDTAIQLIVNKFVPVLMQPFGIVIDYREGLHITPEEFNKIQGRLEKIANKKSYSGNKGSRMPKHNETFKKLKNSQSLFYEKLQEISAPSQAEQQFENTVRQTGEYAKKTGIKIGNTVSKQVIEVSDQTGIGIKLAKITIKEGFNTSFDFLKVGTHKTAILLEKIAPGFSLFFNVQTATSVVIQSQFSSNNPLDQDELSRSYDVVKFSAALISLTADLTLITSKVTKHAHKFMPNASPVLLNNLKGTSDYLSNKLNAKWVKSGLGLVNIMGAYVSFIDGREAEAIGNRGAAYSNYAIGLGSAALGTVSIGLAAGIESVAIGTTLMAGMAFMGWVLVIGGTISLIIFNSSDTQNLFRNSFWGNGDMYPFWNEDKRPSFNRQLDIAKKMSSKTQKAFKIESQEFLNLFFMPELTITRKQVYNKFSSVYTFKLPAFQQGTSDLQYAFYQLLPQKPVNTWLSGNAAPSELIQKHMKSLKEEQERYEKLKYQAEEIDGKLYVYDKELTARFRESLKTAEAKYINGNLELIITVEDRYPYPNEETAELFWHYIPFEDAAVPLRYLAHKQEEQDISKKSIIGFKGTEFR

SEQ ID NO: 6577 - protein, 254 aa, Xenorhabdus sp.
MVSGLTYRCLFKGKTQITLEDSAPYLVELTGSENNQFLRDIFITHHTPDIGIFIHTDSKFDELYNHLRKFSYLQQESSREWVFFRFYYSLTVDLMLKSLSRGALASFMRNIGAIYGLTNENSMMKISVTESLRETKPETVTINDRMNHNFELYVQQRYFHKVKAFIKDNIQQQCQVPEEQLLSFITKHANYAYLHGFTLELTGLYYIMARSMTVKNEDFWQHILATVLSEPSNQEARAYKLLKECLNPTTWSQS

SEQ ID NO: 6578 - protein, 305 aa, Xenorhabdus sp.
MELKFLGTSAGIPTKERNVTSLILDLQEIRSSLWMFDCGEGTQHQILHSPIKISKLEKIFITHLHGDHIFGLPGLLCSRSMGGSTDPLTLYGPKGIRQFVETSLQLSGSFLTYPLEIIEVQPGLLFDDGAMKVTAYALDHRVECYGYRIEEHDRPGTLDAQKLDQDGIPRGPWMQTLKQGGTVTLEDGRTISGKDYLGAPIRGKSLAIFGDTEPTPEALKLAADVDVMVHEITLEHSFAEKANERGHSTTKQAATLARDAKVKHFIATHISGRYGKEDCPRLLAECREIFPNTDLAEDFAAFVVK

SEQ ID NO: 6579 - protein, 143 aa, Xenorhabdus sp.
FTATRGQGAQLNGYRLRGANARDLDGTIIATGFPFKAKQHAIPYMNVLGKLFERCADFRRTGSAALDMAYVAAGRVDGYFEIGLKPWDFMGGELLVRESGCIVTDFVGGHNYISSGNIVAGSPRIVKDMLSEMREELTEALKR

SEQ ID NO: 6580 - protein, 401 aa, Xenorhabdus sp.
VKNRTTGSIFIVAGTTIGAGMLAMPLAAAGVGFSTTLVMLVGLWALMSYTALLLVEVYQYNKANTGLGTIAKRYLGVGGQVLTGFSMLFLMYALTTAYISGAGELLAASLSAWLEKDISVSIGIIIFTLVAGSVVCISTRSVDLINRLLFTAKVIFLVLVLGVMMPHVDKINLISMPIEKGLVLSAIPVIFTSFGFHGSVPSIVAYMGGDTNKLRKIFLIGSAIPLSAYILWQLVTLGAISSNTFVGILAQQSGLNGLLQAVREVVASPKVELAVHLFADLALATSFLGVSLGLFDYLADLLKRRNYAKERLQTGLITFVPPMLCALFYPNFVMALTFAAVALSILALLLPCLLVWRCRKENQGGYRVKGGNPALVLIFLCGISVIAIQVGIVTGILPELG

SEQ ID NO: 6581 - protein, 465 aa, Xenorhabdus sp.
AKADYDELILQARNGNTIPMLEYIRQEEKRRKLSSSQVADWLQIAGWAGRDNEVIELWQRYHSMELPARGIAAVARSYRNQRQWTQSVQLWHLASVLEEQNHDLKAGLIMTLADAKRDSEARRLAKRLLAQHPNAANYRLMAYVDEAAGRTWDAMQMLSTAHERFPNDKNTTHDYLFSLKNNRVNSPAWLLEQQYASKLQLSPGQQRRLEADAAAELVRLAIVPNRSETERFDIADRALVRYEQMLNEWREQPDAQQDYRRARIDRLGALLARFRTQELIEEYLLLQQPSSTEENTEIPDYAHKWAAAAYLNLRQPDKARNILRPLSYPNGKYPDKETPTSHITLEDDSVLFYSDVESEHLNEAQKLAANIKQRNVYMVNVYGSPIRVPNDGWLQGQQFLAESAQLNEDLPEAEKRFTHLARTAPSNQKLRLDLGGIWLDRGWPRRAESELKQAEGLDHRNLSLE

SEQ ID NO: 6582 - protein, 240 aa, Xenorhabdus sp.
EETTKQALILPFLDILGFSPYDPQKVKAEYGADFPGVKANERVDYALFCQGVPVMFIEAKGYSEKLDNHCPQLSRYFNSTPEVTISAITNGLEWRFFTDLKQKNVMDPNPFLRIKMDEVSDADASQLFRFRHDKFKPEALRTLAEESVYLSAFTKTISASLRDIDGEFVRYVASRSNVERQLNQRFIESITPLVKQAVEKSVSAMVVSGLSNKHTPIDGVQDEVEPQETLKEPDEIVGSR

SEQ ID NO: 6583 - protein, 180 aa, Xenorhabdus sp.
MKGFIAVSAASLLFMTGTANAISVNVEAGKHYTSTSAGIGDKNAGFSLNGNWARSDHNGQLGSLGLAFALPVGPLTASVGGKALYLSPKVGKDGAALAAGVGLSVAVTPSLSLYGEAYGAPSGFTSGIDSYTEANGGVRYLLFRPLSVEAGYRVIDLKGKGGNRSNKVSDGFYIGAGVNF

SEQ ID NO: 6584 - protein, 467 aa, Xenorhabdus sp.
FNQWPWHHWAVCAPEKQAALLYGKNLTWQQLATKINTIADCFRQQGVSEGSGVILRGKNSTDLLLCYLATLQCGARVLPLNPQLPESLLVELLPRLNMAFVADFTDFPSSAIQAIKLNWKTKFTVTSGKCVTWDLILWDKHRPASMILTSGSSGLPKAVVHSMEGHFASAKGVLSCIDFSSHDRWLLSLPLYHVSGQGILWRWLLKGAELVLENMHSLDRALSGCTHASLVPTQLWRWLSQPHEYKQTLKDVLLGGAMIPQELVQQAGKLGIRCWCGYGLTEMASTVCAKRADGLPGVGIPLPGKEIRLQDEEIQIRADSMAMGYWSDGKLQPLINENGWFSTRDRGVFERDELRILGRLDNQFFSGGEGIQPEDIERIINQHPEIQQSFVVPVPDPEFGHRPVMVIETNLPKLTTTLASWLSDKLAPFQQPVACYLLPEQLKNDGIKIPRQQVKQWVLQKYVTCIS

SEQ ID NO: 6585 - protein, 319 aa, Xenorhabdus sp.
MEAGVILRYQRLKTRDGFLVHIQENEEHGWGEITPLPEFSHETLEQAEQAAVAWLTRWCQAEKGAEKEPEQSELPSVAFGISCALAELRGELPEEADYRKVPLCTGDPDDVILRLGEMTGQKIAKVKVGLYEAVRDGMVANVLLEAVPELRLRLDANRSWTRTKADGFAKYVNPDYRQRIAFIEEPCKTREESLDFARETGIAIAWDESVREDGFTVKAETGVAAIIIKPTLVGSIDRCCQLITEAHQAGLEAVISSSIETSFGLTQLARLAHWLTPDTLPGLDTLNLIQSQLIRCWPDSDIPCLESDKLEITWSHECH

SEQ ID NO: 6586 - protein, 285 aa, Xenorhabdus sp.
MLYPCEEKLYAPIDWQDCSNGFEDILYHKSTDGIAKITINRPQVRNAFRPLTVKEMIQALADARYDDSIGTIILTGMGEKAFCAGGDQKIRGDYGGYQDDMGTHHLNVLDFQRQIRTCPKPVVAMVAGYSIGGGHVLHLMCDLTIAADNAIFGQTGPKVGSFDGGWGASYMARIVGQKKAREIWFLCRQYNAQEALDMGLVNTVVPYAELEKETVLWCREMLENSPMALRCLKAALNADCDGQAGLQELAGNATMLFYMTEEGQEGRNAFNEKRHPDFSKFKRNP

SEQ ID NO: 6587 - protein, 207 aa, Xenorhabdus sp.
MPLVDVFAKDGLAEMNALLSKTLLAYQIHDYWLIGYSLGGRIAMYHATQTQAVQGLRGILVEGGNPGLLSQEEREARLLHDKNWAQRFRSEPIAAVLADWYQQPVFADLPAAQRLRLIHLRSQNRGNSIADMLENTSLGHQPYLIPELQKLAVPFLYLCGEHDQKFKGIAQQFALPLKIISQSGHNVHSSNPAGFSAAVNHFLSLFG

SEQ ID NO: 6588 - protein, 564 aa, Xenorhabdus sp.
MSNSALNRRWAELLLEALTRHGLRHVCIAPGSRSTPLTLSVVKKAAAQNGKLICHTHFDERGLGHLALGLAKASGEPVAVIVTSGTAVANLYPSLIEAGLTGERLVFLTADRPPELIDCGASQAIRQQGIFASHPSQTLTLPRPTTDISASWLVSVIDNAMSNLRQGGLHINCPFAEPLYGNDDKYQSWLQTLGDWWQGDQPWLRQSMVTVTTKVTDWDYWRQKRGVVLAGRMSAEEGQLVAQWARGMGWPLIGDVLSQTGQPLPCADLWLNHYRTQEILAKGELVIQFGSSLTGKRLLQWQAECQPEEYWVIDSIAGRLDPANHQGRKLTCDIAAWLQAHSAHADHPNAFWANELKIWSEKTSECVAEKLSGKFSEAAVAHQLYQLLPEEGQLFVGNSLVVRLIDALGQLPVGYPVYSNRGASGIDGLIATSAGVQRATGKPTLAIIGDISALYDLNSLALLREVSSPMVLIIVNNNGGQIFSLLPTPQEARQQFYCMPQNIRFNHAAAMFGLHYSAPQSWPELKQSVEQAWLQNAATVVELNVTDNEGAMCLQTLLKQVAEL

SEQ ID NO: 6589 - protein, 440 aa, Xenorhabdus sp.
VRKVVDQIASIIANVCETLGAKNISEVGIQSFSFPLSVTDDTDWLEWLAAQPHYPQFYWQHRDGQEEVVACGQIRLFRDATQAENFLNQHAQFPQMRIWGLNAWEKEENTDNEESYLFLPRIEIRRCHKATYLYLNIDGQADIDNIYAFLRKIAPHQPFQSSRVTILNTTHRPESEQWNTLLEQALDAITRKKMEKVVMARKTELMLDMPLQAGQFMAASREVNHHCYHFMLAFSDTQAFLASTPERLYYRHQLQLFTEALAGTTINSDDDQKAKELGQWLLKDKKNQHENLIVVDDICQRLQGGVTAIDVAPPDVIRLRKVQHLRRHINGFLNQVSDSDCLSRLQPTAAVAGLPREAARQFLAENEPFRRGWYAGSAGYLGLEQSEFAVSLRCAYIDGALLSLYAGAGIVSGSDPEQEWIEIENKAAGLRSLLSNLSME

SEQ ID NO: 6590 - protein, 35 aa, Xenorhabdus sp.
MENLKEEGESTAQFIISAMSSEIKRRQRKAKVSSE

SEQ ID NO: 6591 - protein, 141 aa, Xenorhabdus sp.
TMEIRVFRQEDFEAAITLWERCDLINPGDDPELDIERKLTHDADLFLVAEVAGEVVGTVMGGYDGHRGHVYYLGVHPEYRGRGIANALVSRLEKKLLARGCPSILIMVPEENDATICMCEKMEYDYWGQEHTVFNKRLIID

SEQ ID NO: 6592 - protein, 193 aa, Xenorhabdus sp.
MAFSGLIGGSLLLTACAGTSGLSWSSLSPLNWFSRTLEVSEQGVGEINKQTDMNLSAIQQGLDNRYRLRSGMEMKNGKFFSVIQGIEGDQVRIELSGLNNGKVAHIIILDEGIKTAWGTKIGTSFSTLYDKAYGACQRSDDIITMQQEIVCIAPQSRNISYVFTGIWNGSEELLPPDDVLKTWKISRIIWKAN

SEQ ID NO: 6593 - protein, 277 aa, Xenorhabdus sp.
MFVASSKRVLPGFGLSLGCSLLYTCLILLLPLSALVIQLSSMTWEQYWQVIANPQVVAAYQVTLLAAAVASLFNMFFGMLMAWILTRYRFPGRNLLDGLMDLPFALPTAVAGLTLATLFSTTGWYGSWLAHFDIRVANSWLGIAVAMAFTSLPFVVRTVQPVLEELGPEYEEAAQTLGASRWQTFRRVILQEVSPALVAGTVLSFTRSLGEFGAVIFIAGNIAWQTEVASLMIFVRLQEFDYPAASAIASVILAVSLLLLFSVNLLQSRFGKRIGGR

SEQ ID NO: 6594 - protein, 282 aa, Xenorhabdus sp.
VADFSEYTQMMRPSINWGKWFLIGVGMVISILFLVIPIAWIFLTAFSQGIDILAQNLVDSDMLHAIWLTVLIALITVPINLFFGVVTAWLVTRFQFPGRQLLLTLIDIPFAVSPVVAGLLYLLFYGANGWVGEWLGDYDIQLMFSWPGMVLVTVFVTCPFVVRELVPVMLSQGSQEDEAAILLGASGWQMFWRVTLPNIRWALLYGIVLTNARAIGEFGAVSVVSGAIRGETYTLPLQVELLYQDYNTVGAFVAAALLAVMAIITLIVKSALQWRLSHLNRQ

SEQ ID NO: 6595 - protein, 379 aa, Xenorhabdus sp.
VAFESFESPVNEGREQDMSIEISKISKSFGRVQILNDISLNIESGEMVALLGPSGSGKTTLLRIIAGLEQQSAGQLKFHGKDVSQVHAKDRQVGFVFQHYALFRHMSVFDNVAFGLTVLPRRQRPEREALRRKVMSLLDMVQLSHLADRYPSQLSGGQKQRVALARALAVEPQILLLDEPFGALDAQVRMELRRWLRQLHEELQFTSVFVTHDQEEAMEVADRIVVMNQGAIEQVGTPQQVWKEPESRFVMEFMGEVNQLHGEIKGSQLWVGGKTFPLEVAPLHQGSVDVFLRPWEMNLSKQQTSSCPLPVKVTEVNPRGHFSLLSVQPVGWGEESLSVIWSDSSSIPVRGSQYFMGGKGARLYEGDSPLKVLKLAESA

SEQ ID NO: 6596 - protein, 293 aa, Xenorhabdus sp.
VASLENFIGNTPLVKLQRVTESIDAEIWVKLEGNNPAGSVKDRAALSMIQQAELRGEISPGDVLIEATSGNTGIALAMIAAVKGYRLKLLMPENMSLERQASMRAYGAELILVSKELGMEGARDLAQQMELNGEGKVLDQFNNTDNSLAHFKTTGPEIWQQTQGRITHFVSSMGTTGTITGVSRYLKFQSDNIQTIGLQPAENSHIPGIRRWSPAYMPGIYQKDLVDQILDITQSEAETMMRLLAQKEGIFCGVSSGGAVSGALRIAAENPGAVIAVIICDRGDRYLSTGVFN

SEQ ID NO: 6597 - protein, 200 aa, Xenorhabdus sp.
VLEIIDGQVISVMTPALAEKAGLYHQDEMTESTFRQKLHEAAITLHGADYIFYFSEEEKKKLLQENIGSTLRQLMEKEDGEVFLTFQSAASEEDLDNAYVELEHWAVFGSFEQDDLICAASMYPWDDALIADMGVLTLEPFRGKGHARQVVRAISKHAYVQGYEPQYRCQIDNFASSALAKSVGLTLFGKWEMVSPDSIN

SEQ ID NO: 6598 - protein, 126 aa, Xenorhabdus sp.
VNKLVAQATTGQSDYLTRKGLPCPNQRLLNDGSLLLVTQTLDGTITGAQIINPKGEKRLVAGTQKKGSVIPLSPVIGIPDTIIITEGYATALTVSQLYEGWVLAAIDEGNLPTVAKQVRERWPDVK

SEQ ID NO: 6599 - protein, 101 aa, Xenorhabdus sp.
MSDIYNHLVRTNFDAMSTEELKDLRKNSEGALSSVMAAMSAMGEMAFWSVDNENYDNRQAREDLRRIGEALMYLPRIAEALNDTEQNAQFELHHREGFPKW

SEQ ID NO: 6600 - protein, 55 aa, Xenorhabdus sp.
VRLITVLADSEGEARLLAGISSLIFVSRQSWNIGINTPFNYSDMSTVQGVNHAQP

SEQ ID NO: 6601 - protein, 405 aa, Xenorhabdus sp.
MAGELNKLSDKKLKTLHGKERNKIEFFADGAGLSAKASKVGGISWVFTYRLDGKKLNRLTIGRYPDMPLKQARETRDKCRNWLASGKDPKLQFNLTMQESLKPVTVKDAIEYWIEHYGRDNRANIDALIRQLEKHIYLYIGEMALSDCEITYWLQCFDKMKKEAPVAAGGMLQLCKQALKFCRVRRYAISHVLDDLTISDVGKKQTKGQRYLEDNELGQLWESIRSGSYLPYYNNLLKILIVFGCRTREIRLSKCSEWNLNSMLWTVPKENSKTGERIIRPISEHMKSFLENLVYQNNKNDYLLGEFKSTETVSEYGTKIWRRLGHVDKWSLHDLRRTFSTKLNDMKVAPHIVDQLLGHILPGVMAIYNKSQYLPEKRVALNQWCERLDLLAANHNNVVILKAAQ

SEQ ID NO: 6602 - protein, 169 aa, Xenorhabdus sp.
MGLLDKLKSLVSDDKKNSGSIEIIAPLSGEIVNIEDVPDVVFAEKIVGDGIAIKPTGNKIVSPVDGTIGKIFETNHAFSIESDNGIELFVHFGIDTVELKGEGFKRIAEEGQRVQKGDLVLEFDLAFLEERAKSTLTPVVISNMDEIKELSKVSGSVVVGESVIMRIKK

SEQ ID NO: 6603 - protein, 225 aa, Xenorhabdus sp.
ELTLEKKVTVVSALLSDRARICMLFLMMDGRAYTATELSTAADIAPSTASAHLSRLVEQNLVSSIKQGRYRYFKIYSKEVAVLLESMMCFVNSESFGVIKTSTPKSLRSFRTCYDHMAGEIAVKIHNSLLSRFWITDDYRLTPQGKEFFFSLGLSLDEKTISGRKFACSCLDWSERYFHLSGFLGSSLLNIFLQKKWAIRQLDSRELTLTETGRRALKQRFGVEI

SEQ ID NO: 6604 - protein, 31 aa, Xenorhabdus sp.
MATAELDATMAAINAMRETSVAFTPIECAFS

SEQ ID NO: 6605 - protein, 36 aa, Xenorhabdus sp.
MSVTTDECRFGVFIVENIGGYPAEKLPAVKISFDTV

SEQ ID NO: 6606 - protein, 85 aa, Xenorhabdus sp.
MLQGTPNVLYTSNTEAPSIRGIETNGPFVGGNTFLSKPIPRATTNVECRFISAAEFNLGKRPIWEVNLNKIFPGPTKPQHRGANI

SEQ ID NO: 6607 - protein, 144 aa, Xenorhabdus sp.
MTVNSLRKMGKNPRILAVHWNQWEAETESLTAAKAEKMNFTRIVAGLSDAIGSRNIPWKFYYPLSVWFDPINTSYVSEAINSVIAANPEYRTLVDARNAPNYNGISTQFGVFTPDDMHYNAETQKWFARQEWAQILAGYKGVEL

SEQ ID NO: 6608 - protein, 293 aa, Xenorhabdus sp.
MLFGNSLEHHQFYALWVVRIPHILLGLMVGWCAALAGAILQPIARNPLADPSLFGISQGSMTMIIILLAFVPTAPNILIVLAALAGGLAVALFLTLLIGNNRASGLAILLMGIAVSSVLGSVSSFLILYLPTELSLHLAGWMEGSLFQASWSVIASFMPLFLLSIIGILLIGPALNRYELGNELALSLGEPIKYSRPMLMGFSVLLSAASVTAVGPLSFLGILAPHLASFISSATGRARLFLSALVGGNLVIAADIMTKAAPAGVFIPIGLSFTLIGVPLFILTMRLRALRKH

SEQ ID NO: 6609 - protein, 255 aa, Xenorhabdus sp.
YGKKTVLHDLSVDFAQGRITALVGSNGCGKSTLLKSIMGFIPLKSGEIFLEGKPIAGIGRKALARKISYLPQECHCPDYMTLGELIELAACGRHSLFGGASARDRKLFHDVLEIVGLADQANSQVSALSGGQRQRAWVAMVLAQDTDIILMDEPVNHLDIKYQYTVLKLIRDLSLQHGKTIVVVLHDLNLTTTFADDVVMLNTGNVVAAGAVSKTITVDNIQRVFDIPADIFSYNGSLICQPYPGINHPENWSGV

SEQ ID NO: 6610 - protein, 316 aa, Xenorhabdus sp.
MEYFAELFKIPFEDSWGYVTNGGTEGNMFGCYLGRELFPDGTLYYSKDTHYSVAKIVKLLRIKSCLVESLPTGEIDDYDLLQKIIAHKEPHPIIFANIGTTLRGAVDNIKIIQQRMQQAGIPRENYYLHADAALSGMILPFVDNPQPFTFADGIDSISVSGHKMIGSPIPCGIVVAKRKNVERISVDIDYISAQDKTISGSRNGQTPLMMWAAIRSHSFTDWRHRVKRCLEMAQYAVKRFRSAGIDAWCHNNSITVVFPCPSVAVWKKHCLATSGNTAHLITTPHHHDSSKIDILINDVIADSRQIVNVRDVVCEQ

SEQ ID NO: 6611 - protein, 451 aa, Xenorhabdus sp.
MNNIDLIGIGIGPFNLGLAALLSSHSNLTSLFLDRKPEFRWHEGLLLPGTTLQVPFLADLVTMADPTHPLSFLNYLHKHDRIYKFYYYEKFQIPRQEYDHYCRWVTQQLPSCQFGENVIDVAYDLTSECFIIESKTHARSTHQYYSRNLAIGIGTAPFLPEWANIQTKAPIIHSADFINKRAQLSTCRRITVIGSGQSAAECVLALYSALTPEMIEDGASIQWITRSAGFHPMESSKLGQECFTPAYMNHFHSISREKRRTIASGQGGLYKGISVSTIADIFDILYERSIGGRDPGLSLVSNCEVEQVENREDSGTLQIVFRHQQLDEVSFIETDAIIAATGYKHTRPKWLEGLKQTVLATDDYGDLIVKEDFSAQRIDKGKGLIFVQNAEIFQHGIGSPDLGLGAYRNSIIANQLLGRAYYRLPQNSSFQSFGLQEHHNIGDKNDVIPCR

SEQ ID NO: 6612 - protein, 1511 aa, Xenorhabdus sp.
MRELTSMQAAYWVGRHVQADLGGVAAHLYAEFDGDDIEVSRFKQALERVCSLHPMLRLCVDAEGLQSVTSSGEQLSLEIDNFRGLSEQEVEKLLLVKRAKWTHHKLDLSSGQASRFSLSLLNDGKFRLHIDTDMIAIDPSSFRILMEDLAIFYDNPDQPAPVVASYFEWCDQVRTDPHLKAARERDRIWWRSRIPHIPPAPALPINKTPPDQVHSHRLAAWLQPDERQALKRLARIHKITMSSLMLGLFSIILGRHTGDKRFRLNVPMFWRSPHVNDVERIAGDFSNVLILGVDINRAESPADLSQQLGEQLTDLLAHSAYPGVNLMRDLSRHHGATQLTPVVFTAALDMSGEELLSDRVRQAFGSMNWVISQGPQVALDAQVASADGGILINWDIRLDILPEAWITSMFDSFVSFVREIATHPQRFDEAIHSSPNNVAALSSIIRRKSADSTAQIDLKNNIGLKNNMEKMDNTEKPLTPLQLAYLLGRRAELPLGGVAMQEFREYRGSMELAHLRNNLENMVQRHDSLRTRIDAKRLVQYVCADADINLHQVDLSTMSREEALRHVENHREEYAHTLCNLDRSPWDITLFRLPECRLPKNQLEKDELIAFVRFDALILDGRSIAALMVELFEGKVSLVADTDASLNESHISEKRKTDEAYWKTKLDAVSGAPRLPWIKPLVQIGTSRYARQSLIVTCEDYAAVSKAGTKQTLFKNSTIMALVLEVLSHWSEEKNLSIGIPVAPQISGVLCNRSSFIVVNWDAEQGNISERASTLQNDVMEGIEHLAFSGIDITRMLVEKNGAGPVLPVVITNGLSWPVSGQDSGMQLHSGLTQTPQVAMDIRFSTNADKELIFDIDYATSAIEPAFVQDILRALSKAIQIIVTSGVFTLSAQNIIDTDHYRLNGVEADFHCGQFLSRIAANIFDNKNTKTALICGDRHISYADLGRDVRRIMGAFREKGLSEGSIVALCLHRGPEHTAVTLACALTGVIWVPIDADSPSERLHYLLENCHPDLVVTTKREGIEHPAEMPETLLSAEPLAELPLPLDALSSSEAPAYYLYTSGTTGRPKCVVLSNKSTSNVITSTLKEWSVTHQDVFISVTPLHHDMSVFDVFGSLTAGATLVLPAVGEEKDALCWNQLVARHKVTLWCSVPAILEMLLACRQGDELKSLRLIAQGGDYIKPAVIGSLRTLLPSVRLISLGGPTETTIWSIWHEIGQDDISQIPYGKPLPANSYFLLNECGNHCPVGVTGLIHTAGVNVALGYLENGKLTQTNFVTIRDTNGENIRAFRTGDHGHYRHDGIIVFDSRVNGYIKVRGVRISLPDIENELVRHPSVKHILVVDYGDEMHGETSIGVLYVPLKEDALSGAELRKYASQCLPPSHVPTRFAQVTELPLSPNGKPDRPKARSLLMESVHEASPIRHNSSPEQQTEIEETGMKKKVLEIYLDVLGQSRDSHFDVSSDFISMGLRPQHLKTISARISEEFAIGVSLPQLLRCRNAAEVEQQLNASLRF

SEQ ID NO: 6613 - protein, 307 aa, Xenorhabdus sp.
MGTSAFAASRQVTDILGRDVVIPEDPQRIVVMSEPAIGLPLMELGVEPVGSYGRTEDGIYQLGTDFVDTVLGEGRTKPKGIGAGREIDLEKLYALKPDLIIGTEFDIDKVKQLSTIAPVYLQNFLSGKSHNFHIEENLAQLTGREQSFQKRRDMYLQRVAATRALLPENPAKQTYLPILVTDQINVVGEATGFTQALEDLGFTRLNLSKQSGLSDNSSQLLLQLSADKLGELNPDVLVVLNSWGSKEHDEKAIRSALDRVVPGWAHYMKPAREKRIVFLNAGEVFTPTFASAEHTLKAVEKWAKSKQ

SEQ ID NO: 6614 - protein, 279 aa, Xenorhabdus sp.
EQAVILYQRLPRALISVYVGAVMACSGLVFQGLIRNPLASSSTLGINAGATLFVVAGAIVFSLDLTSQGIAALLGGLFGFLSSLLISRLSGVNAVSRDLLLILAGTLIAMLYLGVSNAVLLAYPETRTEYLSWLAGAINHVYITRLHHFWWFGLLALIVLLLLARPLTLILLGYEKAHSIGVNATLVSRIALIAAIVASSSAVAICGPIGFVGLVVPHIVKPLVGQNFILSLPACALTGASVCLIANLCAQTLFQPYVIHTGILMDFLGGLFFIWIIRK

SEQ ID NO: 6615 - protein, 57 aa, Xenorhabdus sp.
VLPVWLWLHYNNQNRGKLESNEIQRLEQLSENARRMQERIKTLEDILDAEHPNWRQS

SEQ ID NO: 6616 - protein, 103 aa, Xenorhabdus sp.
VIKGVCAGLANYFDVPVALIRTITILSIFFGLSAITVVAYIILSFVMDPAPVGYQPEETRAPSTRKILDEVDYQLRAGEERLRQMERYITSDTYNVRSRFRQL

SEQ ID NO: 6617 - protein, 465 aa, Xenorhabdus sp.
MKRLQNELTSLVNRGIDRHLRLAVTGLSRSGKTAFITSLVNQLLNVHTGARLPLFSTVRDGRLLGVKRVPQRDLGVPRFAYDENIAALYNTPPYWPIPTRGVSEIRLALRYRSEDSLLRYLKDTSTLYLEIVDYPGEWLLDLPMLEQSYLAWSRQMNGLLKGNRAEWAKPWLELCKQCDPLAPADENLLSRIAQAYTDYLHQCKTEGLHFIQPGRFILPGDLTGAPALQFFPWPDIDGIGEPQLLKADKQTNIGMLRERFNYYCDHIVKGFYKEHFLRFDRQIVLVDCLQPLNSGPHAFNDMRLALTQLMQSFHYGKRTLFRRLFSPCIDKLMFAASKADHVTADQHVNLVSLLQQLVQEAWQNAAFEGISMDCVGLASIQATESGIVMHEGEQIPAIKGNRLSDDKLLTFFPGEVPQRLPSNDFWQRQGFNFESFRPRQVSIDAPLPHIRMDSAMEFLLGDKLT

SEQ ID NO: 6618 - protein, 261 aa, Xenorhabdus sp.
PLKPRVDFDDMLSAPSEPSLKSQQEFNEQDSEFYPVLPELNPEEQDSELEGAVNVALKPKRGPWRKIFSGALLLLGFSVIAQFIQWIYQSWQNQDWIALGVAAAGSMIVFAGIGAVIGEWRRLYRLRQRTEERDIAKTLLQSHGIGKGRQFCEKLADQAGIGQQHPALQRWLSAIHETHNDREMVILYSKLVQPVLDEQAKKEIRRSAAESALMIAVSPLAVVDMAFIAWRNIRLINRIAAIYGIELGYFSRIRLFFHIKG

SEQ ID NO: 6619 - protein, 494 aa, Xenorhabdus sp.
MTVNSPMLITFIVYIAGMLLIGFMAYRATKNFDDYILGGRRLGSVVTALSAGASDMSGWLLMGLPGAIFLSGVSEIWIALGLLLGAYLNWRWVAGRLRVHTEINNNALTLPDYFTNRFDDSSKILRIISAVVILIFFTIYCASGVVTGGLLFENTFGISYEHAIWLGALATIAYTFLGGFLAVSWTDTVQATLMIFALILVPVLILLNVGGVEKAIIIIEAKNPVYMDIFKNLNFVAIISLLGWGLGYFGQPHILARFMAADSHQTIHKARRISMTWMLLCLAGTSAVGFFGIAYFSIHTDQAGPVLQNHERIFMELGILLFNPWITGILLSAVLAAVMSTLSCQLLVCSSALTEDFYKAFIRTKASQKELVWVGRMMVLLVAAIAIVIATNPNNKVLALVSNAWAGFGAAFGPVILISVIWQRMTRNGALAGMLVGAVTVLVWMKFEWFGLYEIIPGFILASLAIVVVSLLGKAPNKTIQQRFIEAEAQYNTK

SEQ ID NO: 6620 - protein, 76 aa, Xenorhabdus sp.
MPLDNFYREKKAPSPLRVIWRLFYADALAMTGFYGVLILIILSLFGSHLAPYQLDQQFIDQLLPPSWSHYGNVAFF

SEQ ID NO: 6621 - protein, 166 aa, Xenorhabdus sp.
VTGSALIDAWLSKSPYRNEMIMNVILHMILPVITLSVAPMTDVIRLMRNSAEEISASNYIRSAATRGLSKLTIIRRHLLHNALPPIIPKLGLQFSTMLTLAMVTEQVFNWPGLGQWLISAIRQQDYSAISAGVMVVGTLVISVNVLTNIIGAMANPLKHKEWYAIR

SEQ ID NO: 6622 - protein, 535 aa, Xenorhabdus sp.
ATIRQHGFIYCVNGNLSTFNPQMAISGLTVDTLAAQIYDRLLGVDPLTYRLIPELASRWEIQDNGATYRFYLRHNVAFQSTAWFTPTRTMNADDVVFSFRRLFDNKHDYHYVNGGHYPYFDSLQFGDSIQDIRKIDKYTVEFRLNAPDASFLWHLATHYSPILSEEYGQKLHNINKEEQIDWNPVGTGPFMLEDYQMGQFVRLIRHDNYWKGKPLMEQVVVDIGASGTGRISKLLTGECDVLAYPTANQWDILHNDPNLRLTLRSGMNIAYLAFNTSKPPLDKLEVRQAIAYAINNQRLMRAIYYGTAETAASILPRASWAYDNRAEITEYNPEKSCQILNKLGLDGLELTLWVPTTSKPYNPSPLKMAELIQADLAHVGIKMTIRPLEGRFQESQLMDKSHDMTLAGWSTDSNDPDSFFRPLFSCAAIASQTNLSRWCDATFDNAIHQALLDQQLAARIKSYHIAQQILAQQLPVLPLAYPMRSQIFRYNIKGLVLSPFGNSSFAGVHREQEHSISSEKTSTGNTPAENKKGSK

SEQ ID NO: 6623 - protein, 1326 aa, Xenorhabdus sp.
MGSTTMGVKLDEATRNRIKAAAQRIERTPHWLIKQAIFNYLERLENEEKIPEISAAQDNKEEKISEEESPIEARYQPFLDFAEHILPQSVKRSAITASYRLPETQAVPMLLQQAQLPEEQSKAAHKLAYSIAEKLRQQKQGIGRAGLVQGLLQEFSLSSQEGVALMCLAEALLRIPDKATRDALIRDKISNGNWHSHLGQSPSMFVNAATWGLLFTGKLVSTHNEAKLSKSLTRIIGKSGEPLVRKGVDMAMRLMGEQFVTGETIAQALANARKLEEKGFRYSYDMLGEAALTEEDAQAYMVSYQQAIHAIGKASNGRGIYEGPGISIKLSALHPRYSRAQYERVMTELYPRLLSLTLQARQYDIGINIDAEEADRLEISLDLLEKLCFEPQLEGWNGIGFVIQAYQKRCPFVIDSIIDLAQRSRHRLMIRLVKGAYWDSEIKRAQIDGLEGYPVYTRKVYTDVSYIACARKLLSVPNLIYPQFATHNAHTLSAIYHIAGQNYYPGQYEFQCLHGMGEPLYEQVVGKIADGKLNRPCRIYAPVGTHETLLAYLVRRLLENGANTSFVNRIADTNLPIDELVADPVKVVHELAKSEGQIGLPHPKIPLPIDLYGKNRANSSGLDLSSEHRLASLSSALLSSSMEIWNSEPLLGGDYTHTGELPVASPVNNPAKSSDIVGYVRETTEQEVRHALEVATNAETIWFATPPSERAAILVRAAELMEDNLQSLLGILVREAGKTFNNAISEVREAVDFLYYYADQVRQDFANDTHRPLGPVVCISPWNFPLAIFTGQIAAALAAGNSVLAKPAEQTPLIAAVAVKMLHQAGIPREVLQLLPGQGETVGSMLVGDERVRGVMFTGSTEVASLLQRNIAGRLDAQGRPTPLIAETGGMNAMIVDSSALTEQVVTDVVASAFDSAGQRCSALRILCIQDDVADRTLTMLKGAMAECRMGNPEHLFTDIGPVIDAEAKANIERHIQAMRTKGRTVYQATHENAADSREWPQGMFVKPTLIELESFDELKKEIFGPVLHVVRFKRDELDQLLDQINASGYGLTLGVHTRIDETISQVTGKAKVGNLYVNRNMVGAVVGVQPFGGEGLSGTGPKAGGPLYLYRLLSQRPVNGATQALTRQDEEYPLDATIRTALHSPFNKLAEWATSNNHSELNHIIQEYALLAQGGTTRLLPGPTGERNTYTLLPRGQVLCLADNEQDTLIQLAAVLSVGCQAVWEKDELHQQLLKQLPKEVRHAIYLVNDWQSEDTVMEAVIYHGDCDQLRQVCETVAQRKGPIVSVQGFARGETNLLLERLLHERSLSVNTAAAGGNASLMTIG

SEQ ID NO: 6624 - protein, 142 aa, Xenorhabdus sp.
MKTFTAKPETVKRDWYVVDADGKTLGRLATEIARRLRGKHKAEYTPHVDTGDYIIIVNAEKVAVTGNKRADKIYYHHTGHIGGIKQATFEEMIARRPERVIEIAVKGMLPKGPLGRAMYRKMKVYAGSEHNHAAQQPQVLDI

SEQ ID NO: 6625 - protein, 130 aa, Xenorhabdus sp.
MAENQYYGTGRRKSSSARVFIKPGSGNIVINQRSPEDYFGRETARMVVRQPLELVDMLGKLDLYITVKGGGISGQAGAIRHGITRALMAYDETLRSDLRKAGFVTRDAREVERKKVGLRKARRRPQFSKR

SEQ ID NO: 6626 - protein, 213 aa, Xenorhabdus sp.
MAVAANKRSVMTLFSGPTDIFSHQVRIVLAEKGVSVEIEHVEAGNLPQDLIDLNPYQTVPTLIDRELTLYDSRIIMEYLDERFPHPPLMPVYPVARGSSRLMMHRIEKDWYSLMYKIQEGSAQEANAARKRLAEELLAIAPIFREMPFFMSDEFSLVDCYLSPLLWRLPVLGVELSGPGAKDLQVYMQRVFERDAFLASLTEAEREIRLQSRG

SEQ ID NO: 6627 - protein, 160 aa, Xenorhabdus sp.
MDMTQMSPRRPYLLRAHYEWLLDNDLTPHIVVDVTQYGVNVPMEYAQNGQIILNIAPRAVGNLELADDEVRFNARFGGVARQVSVPMSAVIAVYARENGAGMMFEPEIAYETDSELEISESPVADNLVLIRDMKTSHDDNPPDDEPPQPPKGRPTLRVVK

SEQ ID NO: 6628 - protein, 43 aa, Xenorhabdus sp.
MLLIDDGWYLSAIAKTSIGLLIKAKDNELKIWLEKSWWMLGTN

SEQ ID NO: 6629 - protein, 779 aa, Xenorhabdus sp.
MKFIRGLAQYYVDLMMKLGLVRFSLLLASVLVILAMTMQMAVTFVLHGEVQRIDLIRSIFFGLLITPWAVYFLSIVVEQLEESRQRLSSLVAKLEEMRQRDAKLNQQLKDNITQLNQEISEREKAEQAHLVLLDKLKLEMEHREKTQIELEQQSVLLRSFLDASPDLVYYRNEDNEFSGCNRAMELLTGKSEKQLIGLTPTEVYDKEIANKVMETDEKVFRHNVSLTYEQWLVYPDGRKACFELRKVPFYDRIGKRHGLMGFGRDITERKRYQDALENASRDKTTFISTISHELRTPLNGIVGLSRILMDTNLTPEQGNYLKTIHVSAITLGNIFNDIIELDKIERRKVQLDSQPIDFTSFIADLENISGLLAQPKGIRFVLEPELPLPARILADGTRLRQILWNLIGNAVKFSQKGEIRVRIWREKGDRLLFEVTDSGIGIPADELEKIFAMYYQVRDSAGGRPATGTGIGLAVSKRLAQAMGGDITVNSTVGKGSCFTLSIIAPAIDENPEGAEEEDALPLPALNILLVEDIELNVIVARSVLEKLGNSVDVAMTGGDALDMFDPDEYDLVLLDIQLPDMTGLDVARELHQRYPNHTLPPLIALTANVLKDKKEYLDAGMDEVLSKPLSVKELTAVMEKFWGKSAEAETVLPEFIEPKKEEELLDTEMLNQYIDLVGPKMVIDNLTIFEDMMPGYLALLDSNMTARDQKGIAEEAHKIKGAAGSVGLRHLQQLAQQIQSPDLPAWWDNVQEWVDELNLEWKNDTETLRNWLTGATKK

SEQ ID NO: 6630 - protein, 472 aa, Xenorhabdus sp.
MSQNVYQFIDLQRVDPPKKALKVRKIEFVEIYEPFSEIQAEAQADRCLDCGNPYCEWKCPVHNYIPNWLKLANEGRIIEAAELSHQTNSLPEVCGRVCPQDRLCEGACTLNDDFGAVTIGNIERYINDTAIAMGWTPDMSQVLPTGKRVAVIGAGPAGLACADVLARNGVQAVVYDRHPEIGGLLTFGIPAFKLEKEVMSRRREIFAGMGIEFCLNTEVGKDVDLAELTKQFDAVFLGVGTYQSIHAGLENENASGVYDALPFLIANTRQLMGYEESPEQPYIDMKGKRVLVLGGGDTAMDCVRTAVRQGASHVICAYRRDEENMPGSRREVKNAREEGVDFQFNLQPISVEINHNGHVNGVRMARTQLGEMDTKGRRQAELIPDSEFVINADAVIMAFGFKPHSMTWLDDHQINLDRQGRIIAPESSILPFQTSNPKIFAGGDAVRGSDLVVTAIAEGRKAASGILDYLEV

SEQ ID NO: 6631 - protein, 164 aa, Xenorhabdus sp.
MTMLKERQHMIVRAMNDKNHVMKPISKEKLQFLGEAFGWDQLADDINYLVKVGLVNHFAIHFDDNGGYGFNPDSMALTAAGVDYANMDTIDDEMKSFTIKVHKNTLEQIETVIKTANIPDNEKKVILEFIREQGIETVLGKCLDTLLTKVDLATPLFSEVAKMR

SEQ ID NO: 6632 - protein, 250 aa, Xenorhabdus sp.
MKYRLSGVALTAVLLAGCANSSNNYEQGRSDPLEGFNRAMFNFNYNVLDPYILRPAAVVWHDYVPMPARNGIGNFMSNLEEPASMVNSFLRGDIKEGAKHFNRFFLNTILGMGGLIDVASMANPKLAKQDPMRFGSTLGYYNVGYGPYVVLPGYGSFTARDEGGDMADMTYPVLSYLTPWMAVGKWVFQGLETRARLLDSDGLIKNSSDPYLMMREAYFQRHDFLANGGKLLPEENPNAAAIEDELDSID

SEQ ID NO: 6633 - protein, 98 aa, Xenorhabdus sp.
MTDVIKRHGANETAACCCADVGTVIDNEECTASYQQIFASSQEADAMLNILTKKAKKVESDPCIISHKIEEVHDGMQLAIDFTFSCQAEDMIFQLGLR

SEQ ID NO: 6634 - protein, 429 aa, Xenorhabdus sp.
VAQQKERVAIVSGLRLPFAKQATNYHGIPAVDLGKAVVSELVIRSGLPPEKIDQLVFGQVVQMPEAPNIAREIVLGAGLSVSTDAYSVSRACATSFQAIANVAESIMAGTVNVGIAGGADSSSVLPIGVTKSLARTLVDMNKAKSLSQRLKLLSKLKLKDLLPVSPAVAEYSTGLRMGDTAEQMAKTYHISREAQDELAHRSHLMAAKAWEKGLLRDEVISAHFPPYRESLQEDNNIRKNSELTSYAKLRPAFDRKYGTVTAANSTPLTDGAAAVILMSESAAKELGMVPLGYLRSYAFSAIDVWQDMLLGPSYATPLALDRAGITLNDLSLIDMHEAFAAQTLTNLKMFASDKFAREKLGRSQAIGEVDMDKFNVLGGSIAYGHPFAATGARMVTQTLNELRRRGGGLGLATACAAGGLGAAMVLEVE

SEQ ID NO: 6635 - protein, 689 aa, Xenorhabdus sp.
PGEKVNTLKAEFVEQFLAVFEQAQQVSGLKGLVIISGKPDTFIAGADITMIAGCQTQQEATALAEKGQELFDKIASYSLPIVAAIHGACLGGGLEFALACHARICSLDDKTRLGLPEVQLGLLPGSGGTQRLPRLIGVSSALDMILTGRQLKAKQAKRLGVVDDAVPLDILLDVAVQYVKKGVAKRKPLAWSQRLLASSFGRPLLFRMVQQKTRAKTHGHYPAPERIIDVIRLGLEKGQKAGLQAEAKAFGELAMSSESSALRSLFFATTSLKNETGSSELPAQIRHVGILGGGLMGGGIANVTATRGHLPARIKDINEKGINQALKYTWDMLSKRVSQRRLTPSERSRQMSLLSGTTDYSGFKQADIVVEAVFEDLVLKRKMVAEVEANTKAETIFASNTSSLPIHQIAEIAKRPEQVIGLHYFSPVDKMPLVEVIPHAGTSEKTIATAVALAKKQGKTAIVVGDKAGFYVNRILSPYINEAGYCLVEGEPIEHIDKALVDFGFPIGPINLLDEVGIDVGTKIIPVLVDQLGERFTPPAILDAVLNDDRKGKKNGRGFYSYATKKNKFWSFRKNSKEADPSIYSLLKVQPAAKMARSDIAQRCLMLMLNEAVRCLDEGIIRSPRDGDIGAVFGIGFPPFLGGPFRYMDKLGSRHVVETLQRLAQQYGNRFAPCERLIQMAEQDKRFYE

SEQ ID NO: 6636 - protein, 156 aa, Xenorhabdus sp.
MFVFIMRHGDAAFNSISDATRELTPRGCQESQKMALWLEQQNPEIDCVLVSPYIRAEQTLQVVRESLVLPDSEEMLEELTPSGDAELVASYLQVLAEQGKKAILVVSHLPLVGYLVSELCPEQTPPMFSTSSIACVELDKQTQKGRLLWQTSPAQL

SEQ ID NO: 6637 - protein, 417 aa, Xenorhabdus sp.
MSIELKDTDIIWRNARLATMNPTISNMDGKHNYGILEQYDLIIRDEKILAVLPTESVPANRCKVIDAEQRLITPGLIDCHTHLVFGGNRASEWEQRLNGISYAQISAKGGGINATVNATRQSSAQQLEIAAQKRLSALIAEGVTTIEMKSGYGLDLENEEKQLDVIRILGQKNPVEISPTLLSAHAVPPEYKHNPDAYIDLVCDTILPNLWQKQLFESVDVFCESVGFSLEQTKRVFDAARRLNIPVKGHVEQLSNLGGTELVADYQGLSVDHIEYLDEKGVQAISRSGTVAVLLPGAFYFLKETQCPPIALLRQYRVPMAISTDFNPGTSPFTSLRMMMNMACVQFGLTPEEAWQGVTIHAARALGRAESHGQIAAGYMADFIVWDAKEPVDILYELGRNPLVYRVYRGVITHNFL

SEQ ID NO: 6638 - protein, 240 aa, Xenorhabdus sp.
MASHDGHELLVDLGNIRANSGQLSEAQSALSDAVYACQSQKMRTLIFGGGHETAFAHGMGIYRAFPTQRVGIINFDAHLDLRNAPQATSGTPFRQLADYCHQQQRPFNYSCVGASLASNTQALLDEANHLDVTIIWDTQCIDSMLDKVQQQIQDMLNQAEIIYMTIDLDVLPIWQMPSVSAPAALGVPLERLLSLIQPICQSKKLQAVDLVELNPLYDIQGMGGKAAARLAWQIVHWWNG

SEQ ID NO: 6639 - protein, 232 aa, Xenorhabdus sp.
PVPLYAKVKQSIIEKIHTGEWQPHDRVPSESELVKQFNCSRMTANRALRELTAEGLLFRLQGVGSFVSEPKGQSALFEIHSIADEIAARTHRHNCKVLKLAEVTANMTQAKELGIKAGTAVYHSIILHYENDVPVQIEDRYVNALAAPEYLRQDFHQQTAHDYLSIVAPLTEGEHIVEAVAGDARSCRLLQIEENSPCLLISRRTWSKEHIVSSARLLFPGHRYKLKGRFSS

SEQ ID NO: 6640 - protein, 567 aa, Xenorhabdus sp.
TQNNKFSNAVIRAPRGTKLTAKSWLTEAPLRMLMNNLDPDVAENPHELVVYGGIGRAARNWECYEKIVETLKNLESNETLLVQSGKPVGVFKTHENAPRVLIANSNLVPHWATWEHFNELDAKGLTMYGQMTAGSWIYIDSHGIVQGTYETFVEAGRQHYHGDLTGRWVLTAGLGGMGGAQPLAATLAGASSLNIECQQSRIDFRLRTQYVDEQAADLDDALARIERYTREGKAVSIALCGNAAEILPELVRRGVRPDMVTDQTSAHDPLHGYLPVGWTWEEYCHRAETEPEHVVQAAKASMAQHVAAMLDFQKQGIPTFDYGNNIRQMAKEMGVENAFDFPGFVPAYIRPLFCRGIGPFRWAALSGDPQDIYKTDAKVKELLPDDNHLHRWLDMARERISFQGLPARICWVGLGDRAKLGLAFNEMVRNGELSAPIVIGRDHLDSGSVASPNRETESMKDGSDAVSDWPLLNALLNTASGATWVSLHHGGGVGMGFSQHSGMVIVCDGSDEAAERIARVLHNDPATGVMRHADAGYELAIQCAEEQGLNLPMLNTRKEDTQAAEIK

SEQ ID NO: 6641 - protein, 366 aa, Xenorhabdus sp.
MKYITIHPGKMTLEELRHIYQHPVQITLDEQCLPAIENSVECVNRIIKENRTAYGINTGFGLLANTRIAEQDLEELQRSIVMSHAAGVGEPLPDEIVRLMVVLKINSLARGYSGIRLEVIQALIALVNAEVYPCIPAKGSVGASGDLAPLAHMSLLLLGEGKARYRGEWLPAKEALAKAGLQPFTLVAKEGLALLNGTQTSTAFALKGLFAAEELLASAVVCGALSVEAALGSRKPFDARIHEVRGQKGQIDVAALYRFVLEEKSDISSSHENCPKVQDPYSLRCQPQVMGACLTQIRHAADVIMVEANAVSDNPLVFTEQDEVISGGNFHAEPVAMASDNLALALAEIGALAERRIALLMDNNMS

SEQ ID NO: 6642 - protein, 42 aa, Xenorhabdus sp.
MKLNNLFLWLLGAEKRYAVVADKKWNSKLINYPTNTKSVKGY

SEQ ID NO: 6643 - protein, 445 aa, Xenorhabdus sp.
LVMNQKNLFSRSALAVAVAIISSNANAAGFQLNEYSSSGLGRAFSGAGVVAEDASEGSRNPAAMTLFDRPSFSGGFIYVKPKVDITGESPVTKNSTDAKNIAPNAPVPNLHFITPVTDELFVGASITSNFGLSTNFSNNYAAGSIGGKTSLKTGNFNLAGAYKVNDQFSFGLGLNAIYADAEIVRHLGEVGSALSQALGKNIPASTEVARLEGKDWGYGWNAGLLYQFDENNRYSLTYRSKVKVKFKNGDYSNQLPYIDTPFLKIPGLAGKTIKGTLDLNLPDMWEISGYNRVAPQWAIHYSFLYTGWNSFKELKGEPKNGGDKPLFEKHEGFRNAYRISLGTTYYHDDNWTFRTGIAFDESPVPAQNRSISIPDQNRFWLSVGTTYAFNKDTSVDVGISYMRGKKVHVNEELPKDLQKGPFATAYDFDSKGTAWLAGVGLNYTF

SEQ ID NO: 6644 - protein, 180 aa, Xenorhabdus sp.
MKKKKPLNEEDISLFRTSVVGTRRTTQDKVLHSPKRKKISHMAPERLIQEQVDASYYFSDEFQPNLDMEGPTRYVREGANHYELKKLRRGDYPPELFLDLHGLTQLQAKQEIGALIAACRRENVYCACVMHGHGKHILKQQTPLWLAQHPDVIAFHQAPKEWGGNAALLILVEQDEFIQR

SEQ ID NO: 6645 - protein, 91 aa, Xenorhabdus sp.
IDDPRSDINKKHELMDVIFLAFSAVLCGASGWKSIQEFGELQIEWLKQYTSFTHGIPRRHCVANIIKMIDQDALVDFFYGWINQRRVTGGK

SEQ ID NO: 6646 - protein, 48 aa, Xenorhabdus sp.
VRDSGELYLAGDWLTETGLLDKSVQIAFGYGKIMLMTESDLPESYKTF

SEQ ID NO: 6647 - protein, 49 aa, Xenorhabdus sp.
MPGCLIITAQNFHELWHCLKSLNEGEWDDIVVAHWLRQFPEKLNKKLPK

SEQ ID NO: 6648 - protein, 70 aa, Xenorhabdus sp.
VTRAKKATKNGPVFITDRGKPAHVLLSIEEYRLLTKQHRNIADSLAMPDVADIEFEPQPMTIGTRPADFS

SEQ ID NO: 6649 - protein, 133 aa, Xenorhabdus sp.
VSELRKIRAGKADPNVAAWAEKVDAADLFVSAITIMELELGILLIERKDATQGTILRAWLEQHVLPEFSERTLPVDTAVAQRCARLHVPDKCSERDALIAATALVHGMTIVTRNVADFQASGVTILNPWESNL

SEQ ID NO: 6650 - protein, 235 aa, Xenorhabdus sp.
VSGGSSEGFLKNASRQIGVEFDKETNLHDITTAAIQAGYPDLGAALEDKISKLNRGTDSAAVMQAGKLNVLSVMPGDPTPTWEVTTREFCASVQVPFTVLFGTQTGKLAGDKDDTTWKVRLNGRRWGFLTQYITRLLRRLWEIGVITPPGSGEVTIAWSDMLAASEQEKIDNMIKMAEAALKTQQAFGTPIFTANEIRTVGELEPLEDEPEPQGAAGDPLTDEKEQNRHPDHTEK

SEQ ID NO: 6651 - protein, 124 aa, Xenorhabdus sp.
MAGIQFITDENGNKQAVVLPIAEYERLLAAVDRDEDYVSIPYTKGPHDNETIPHEVISIMVDEEITLHAAWRIYRGLSQTEVAEKLGVKQAAVSQFEKAERPRQVTLEKLAALYECRPTQLTLD

SEQ ID NO: 6652 - protein, 62 aa, Xenorhabdus sp.
VMQDVLIAEVNRPVTGCLTAQTNQNDVTRLNVIDLLKPLTQAVIEIQVLPRVPPCIITGNIV

SEQ ID NO: 6653 - protein, 96 aa, Xenorhabdus sp.
MITIERTQDFEKWLKSLKDRIAKAKILIRVERMEEGNSGDVEPVGGGVSELRIHYGQGYRVYFANKNNKIILLLCGGDKSSQQVDIKKAKQLAKEW

SEQ ID NO: 6654 - protein, 83 aa, Xenorhabdus sp.
KKFDVVEFLETEEDIQAYLNAAIEENDTKYLFKALGNIARIKNISQVSKESGISREGIYKALSGEGNPSFNTVYKISKALGLK

SEQ ID NO: 6655 - protein, 473 aa, Xenorhabdus sp.
MHDYGIWTIVTPVVTIILAILTRQVMLSLMLGILVGFTVIHDHNIILGIKSTLEGVINTFTSSGNTKTVIFMIMIGGIMRLVTVTGGVRALVQLLTDRTKIIKSKKNVQFLAIIISALIFIESSINQLVAGASTKNLARKYAVPPEKMSYLIQTAGVSVCSLAMINGWGAVMMGIVGVQISNGLISGEPFDIVIHSLGYNLMAWLSLASILFYIFTNVSWGPMKKAEQNALHQHNTPVLDSEKTESDEVIEHPNSNSVLNFFTPILSTVLMVPVALYITDEGDFSKGSGSTSVYWGVMFGTVISFFWFLGRRVLSINTFFEELYIGYASMLKISSIMILAFLMGTVSADLNTGAYIAQITHGVLPVGFSVGFIFVISAIMSLATGTSWGTFAIMIPIGVQLGLSVGMPVEYMIGAAISGSIFGDMTSPISGDAIVASMATDCDHIEHIRTQMPYALVTASIVLSIYLYLGFTY

SEQ ID NO: 6656 - protein, 167 aa, Xenorhabdus sp.
MESLPLIRVLGKSDVKDYRELRLESLYINPESFGATYQEESTKSEQEFITKITGSLILGAYLNNELIGVIGFQQNSNYKTLHKGIIWGFYVKPGYRGLKVGEKLMDNLITLLKKSNVKKLSLAVVEENVSAIHLYEKMGFKVYGKEPISLKIDEEKYVNNILMCLFI

SEQ ID NO: 6657 - protein, 367 aa, Xenorhabdus sp.
RARNFGIPFSGTTGKYNAITDVNGVTVGYSTMIKGNGKLEVGKGPIRTGVTAILPRGKKFSPVFSGIFSLNGNGEMTGNQWVQESGFLETPILITNTHSVGVVRDSAISWLVDNHLVSPLKDDLFWLLPVVTETWDGILNDINGMHVKKEHVYHALDSAKSGMIKEGNVGGGTGMNLFDFKGGTGTSSRVLDKKDGGYTVGVLVQGNFGFRDDLIIAGIPVGQEIKDFMPIYHGDKKKIKDAGSIIAVVATDAPLAPHQLEKIAKRVSLGLAKVGGVARNTSGEIFIAFSTANNDAFSREDIKTIKILPNDKLDPLYEATVSATEEAIINAMFAAETMVGRNGNTSYSIPKERIIKILEHHSLLSRN

SEQ ID NO: 6658 - protein, 273 aa, Xenorhabdus sp.
MCIAALFFTVVSAKTAKADITAPIVYLDRQTPSVSLNINGKKIDKIEIDTGASSALYLPQSVFDSIFTSRDHNIETSRSVDIFGNETLDNVVAKAVDITVNGKKLSGIDVEVLKPWGNGMLDDNGQLRINGLLGLGVVKNNTLIIDYPSKMLTITDNAKNLPDGYHWKNIPFTRKNYGIEVSVSSGNKKLNHMVIDTGASHTVLFTRSKEGCVDFSLLCPKRTIVTPDGIELSAFLFQVPDEKINFDGLLGDDYLSNKALVISDDQLLIGIPK

SEQ ID NO: 6659 - protein, 367 aa, Xenorhabdus sp.
MADNSIRTDLFSPVKLGEIELANRIVMAPLTRTRVNEEGVPNEMMVTYYTQRASAGLIISEATNISAQGRGYAMTPGIWTEEQVTEWKKITNAVHAVGGKMVMQLWHVGRCSHVDLQPNGESPVAPSAIKAAGNVYTVKGLQEASMPRALNTDEIPGIIEQYRHAAECAKRAGFDGVEIHSANNYLLEQFIRDSTNHRTDQYGGSIENRVRLVLEVVKAVTGVWGDGRVGIRLSPVTTEVGETPLDSNVMATYSYLIRQLNSFKLAYLHFVEGTTGKDRLIPEGVDLDALRSLFEGAYIGNNNYDFEMAISRRSEGKVDAVAFGRPFISNPDLVNRLRYNIELTGLDRNTHYGSGAEGYIDWPTANY

SEQ ID NO: 6660 - protein, 101 aa, Xenorhabdus sp.
MNPGVIGEKLGFTRSKTSKILRSLKDKELVKQESSEHDKRELVTKLSPKGLVFLQRTEASKHNMADIVISNMSQGEIAIFTELCHRAADLLSANTLIRDED

SEQ ID NO: 6661 - protein, 283 aa, Xenorhabdus sp.
TNGWFNGFLGVLIFSGSLPATKVAVMDFDPVFLTVARASIAGLLALVILLALKEKRPKLEQIASLVIVSIGVVVGFPLLTALALQYITSAHSIVFLGLLPLATAIFGVWRGGERPRLVFWVFSVIGSALVVGFAFTQDSSASLTGDLLMLASVIVCGLGYAEGAKVSRELGGWQVICWALLISLPIMLILTLIYMPDTFKNVSMPAWISLGYVSLFSMLIGFIFWYRGLVQGGIAAVGQLQLLQPFLGLALAASLLGESVSFLMIIVTIGVVFCVFGSRRFAR

SEQ ID NO: 6662 - protein, 105 aa, Xenorhabdus sp.
ISLVNGLAGIAGLSPYTVAKHGVIGLTKTAALEFACKNIRVNAVAPGYVSTPKINELPEEVLHRFSDCHPMKRMAKMEEVAEFISFLLSEKSSFCTGGIYPVDGG

SEQ ID NO: 6663 - protein, 71 aa, Xenorhabdus sp.
MPVIKVRENEPFDVALRRFKRSCEKAGVLAEVRRREFYEKPTTERKRAKASAVKRHAKKLARENARRTRLY

SEQ ID NO: 6664 - protein, 615 aa, Xenorhabdus sp.
MEQNPQSQLKLLVTRGKEQGYLTYAEVNDHLPEDIVDSDQIEDIIQMINDMGIQVMEEAPDADDLMLAENTNDTDEDAAEAAAQVLSSVESEIGRTTDPVRMYMREMGTVELLTREGEIDIAKRIEDGINQVQCSVAEYPEAITYLLEQYDHVEAGESRLSDLITGFVDPNAEEDLAPTATHIGSELPQEELDDDDDEDEDGEDDTDSDDDNSIDPELARQKFMELREQYEVTRQSIKSHGRSHPSTAAEILMLSEVFKQFRLVPKQFDYLVNNMRSMMDRVRLQERQIMKMCVEQCKMPKKNFITLFSGNETTETWFTAAKAMNKPWSDKLPEVEEEIMRSLQKLRQIEEETGLTIDQVKDINRRMSIGEAKARRAKKEMVEANLRLVISIAKKYTNRGLQFLDLIQEGNIGLMKAVDKFEYRRGYKFSTYATWWIRQAITRSIADQARTIRIPVHMIETINKLNRISRQMLQEMGREPSPEELAERMLMPEDKIRKVLKIAKEPISMETPVGDDEDSHLGDFIEDTTLELPLDSATSESLRSATHDVLAGLTAREAKVLRMRFGIDMNTDHTLEEVGKQFDVTRERIRQIEAKALRKLRHPSRSEVLRSFLDD

SEQ ID NO: 6665 - protein, 70 aa, Xenorhabdus sp.
MHAVEIFHDAGEKSGCTTGWVADSISGLRINQFDHSIDNVARRAELTIDTGGGEFTEQVFVNIAFYIALG

SEQ ID NO: 6666 - protein, 255 aa, Xenorhabdus sp.
MLVAERTGRSTGTGHPGFSFFNRGGAPLTFDPMNKQDRTQNAHLLLFGPTGAGKSATLCASLVQLMAIHRPRLFIVEAGNSFGLLADYYASLGLTVNKIGIKPGCGVSLVLFADAHQLLKLSPKQLRINEADIPETDEAQEDGDEQRDILGEMEIAARLMITGGEKKEEERLTRSDRGLIREAIMLAAQISYEAGHQMVASDLQTALYAIARNHQQDEHGQPLGVACLCSSSSKSKQPDHQPCACMASFSLAHKK

SEQ ID NO: 6667 - protein, 534 aa, Xenorhabdus sp.
MLTGQIRNDIDNLWEKFWTGGITNPLTVIEQISYLMFARMLDMQEDMAERKANRTGKDFDRLFPNTPEGQLLRWKNFKNLSGKELHKHLKQNVFPYFAKLGKKSDEQDGLGNDGSAIEALGHIGEYMQDADLEIKNESVLVSAVEMVDELPLTQSDVKGDIYEYLLSKLTTAGINGQFRTPRHIIDAMIELINPQPTDTVCDPACGTAGFLARIMEYLNRVHSSEFGILEDDDGNKHYTGDLLEPYRDHINKQMFWGFDFDTTMLRVSSMNMALHGVNGANILYQDSLNKSIKENFPQQEENFFDVILANPPFKGSLDETNTNPDLLGLVKTKKTELLFVAHILRALKLGGRAAVIVPDGVLFGSSKAHQQLRQELMENNQLEGIVSLPSGVFKPYAGVSTAILMLTKGGNTERVWFYDLQADGYSLDDKRTPLKGEGSNDLPDAIAKWKQYIVLVEKNASAKEIDTAFGDKTQKAFVVDAKDIVANKFDLSINRYKEVVYEEEKYEDPKEILKKLKALESEIMAGLNELEGML

SEQ ID NO: 6668 - protein, 618 aa, Xenorhabdus sp.
MQSLEWTTKLTIIASVAGLVLTAFGYLLAMVLLGRKNTELNTQLQQADQTLKLANTQNQKYQDELKQLGITLHEKELSESKLQTQQTNAKVTEQRLNDALAERKGELASLQKTLEELRGQHHSTEKQLETAQADNRALKEQAQDLRDRLEKCEQNVQQERTLVSQLKDELAQEGKKAKELEASNTEAREQLKDVKQTLTGQQQRYDQIQEHYQSLSNEYTELKTTLERKEEHFKEQMQQLSETKQSLTKEFENLANKIFEEKGKTFTHTSQASIDTMLKPFREQIEGFQKRINEVHDASLQGNTSLNAEIKKVLEIGLQMSKEANNLTSALKGDSQKRGAWGEAQLRRTLEMSGLMEEAHYEVQGSFRDAEGKQKQTDYLIKLPDGKHIIIDSKVALNAYDRAVSAESPEEYQLAMSEHVKAVRRHIDDLASKDYTNLVGMRSPSFVLMFMPIEPAYIEALKDNKNLFEYGYKKGIVLVSHTTLIPILRTVSNLWMIERSNAEAREISEKAGDIYNSVCTVAERLSKLGGTLSTVSNHYNSTVKALVGQQGLYGKVDRFSQLSAKVSKSLPHLEAAHIDFETERLTLIVEPIDEQTKEQVKDPADERTGERSGRRTDG

SEQ ID NO: 6669 - protein, 243 aa, Xenorhabdus sp.
VRQKDVVIAEVRSAEFWQNPTIDKLEKARKELRGIMKYRQTVSGGLYAIPATKTGDTGLQLKEREVTIAGANEAMIYRRRLKDILDQMIAANPTLQKIRKGESIAEPELKTLTSTILTSHPSVSLEVLNEFYGRTADQLHLTVREIIGLDSQAIEDHFKSFLHAHPTLTAQQVRFMNLLKNYIAQHGSIKIEKLYDAPFTSVSHEGIDGVFTADDVGELITVLKPFIKAEPKLLGSQPESTQE

SEQ ID NO: 6670 - protein, 338 aa, Xenorhabdus sp.
KSGDVLVATVRPNLNGVALVPEEYEGATASTGYCVLRPEGNRLDSKYLYYWVQTRVFVTDMMEKATGANYPAVSDKIIKESKIPLPPLTEQKRIAAILDKADSIRYKRQQAIQFADEFLRAVFLDMFGDPVTNPKGLDVKTVSECISDKIILQVQDGNHGNDHPKVSDFSETGIPFVTANVVRRGKILFDQCYYLEREWLDKLRIGFAKPRDVLISHKGSLGFTAVLDNTFENYIFSPQATYYRVNEEQLLPEYLKAYFDSAFFQRLFAKEGIQSTRAYLGITRQKELPILLPRIELQREFLSIHDYFSKVWANIFNSMPKLDQCISALSQKAFSGQL

SEQ ID NO: 6671 - protein, 375 aa, Xenorhabdus sp.
MALLALPMTFFAHRGMCRFVLSGKNSGEDITGVVEEHFGKVAGFFITILYFFAIYPILLVYSVALTNTVESFIIHQLNMDAPPRALLALVLILGVMSIIRFGEQAIVKAMSVLVFPFVTVLMLLALYLVPHWNTAIFDTLSLENAVSSTNSHGLLFTLWLAIPVMVFSFNHSPIISAFAVAKREEYGENAEKKCSRILGYAHIMMVLTVMFFVFSCVLSLSPENLAEAKAQNITILSYLANHFNTPLIESIAPFIAFIAITKSFLGHYLGAREGFNGIVSKAMSARGKSIQHKTLNRITSLFMLISAWIIATLNPSILNIIESLGGPIIAMILFIMPMYAIYKVPAMRKYAGKPSNIFVILTGSIAISAAVYSVM

SEQ ID NO: 6672 - protein, 89 aa, Xenorhabdus sp.
MMLTVWGRKNSSNVKKVLWCLEELKVPYQQIDIGGKFGKLDDPNYLHMNPNGVIPCLQDGDFILWESNVIVRYLAEKFGENTLYPNDIK

SEQ ID NO: 6673 - protein, 95 aa, Xenorhabdus sp.
MISLVRTPEAQRDQKVIAQALAEIERLLKIADEALSQQTYLSGDKFGMADIALAPFIYPWINVVTERPSLPNLERWYQLMTERPAFQKIVMIEIN

SEQ ID NO: 6674 - protein, 299 aa, Xenorhabdus sp.
MLDKTRLRIAMQKSGRLSDDSRELLARCGIKINLQQQRLIAFAENMPIDILRVRDDDIPGLVMDGIVDLGIIGENVLEEELLSRRAQGDDPRYTTLRRLDFGACRLSLAAPLDYNYTGEECLQNSRIATSYPHLLKRYLDKKGIQFKPCLLNGSVEVAPRAGLADAICDLVSTGATLEANGLREVEVIYRSKACLIQRDGEMPEAKQQLINKLMTRIQGVIQARESKYIMLHAPSDKLEEIIDLLPGAERPTILPLAGAQNRVAMHMVSSETLFWETMEKLKALGASSILVLPIEKMME

SEQ ID NO: 6675 - protein, 448 aa, Xenorhabdus sp.
VDFSTIIRWQACTPKQQEMLLTRPAVTASEDITYTVRQILEAVKERGDSVLREYSQRFDNTTIDAVRVPEEEINAAGRHLTTEIRQAIQQAMDNIRLFHEAQKPVVIEVETMPGVCCQQITRPIDSVGLYIPGGSAPLPSTVLMLGIPASIAGCRKVTLCSPPPIANEILYAAQLCGISDIFQIGGAQAIAAMAFGTESVPRVDKIFGPGNAWVTEAKKQVSQHIDGAAIDMPAGPSEVLVIADSGANPVFTAADLLSQAEHGPDSQVILVTPDESYAGEVIHEIEKQLPTLPRQQIAIQALQSSRIIVADDIAQCVAISNQYGPEHLIIQTRQPEQIVDKITSAGSIFLGDWSPESAGDYASGTNHVLPTYGYTSTHSSLGLADFLKRMTVQKLTPQGLKKLAPTIETLAQAEQLTAHKNAVTLRIAALNNPDNTNNNADTSSQAKE

SEQ ID NO: 6676 - protein, 368 aa, Xenorhabdus sp.
MSTVFDVTSLARENIRKLVPYMSARRLGGNGDIWLNANEYHAAPDFQFSEKTLNRYPECQPATVIQRYADYAGLQPEQVLVSRGADESIELLIRIFCEPGKDAVMFCPPTYGMYSVSAETFGVAQKKILAGIDWQPNITTIKNNLDRVKLIYICSPNNPTGNLIAPSTLRQILELARNRAIVAIDEAYIEFSLQNTTTRWLKEYPHLVILRTLSKAFALAGLRCGFTLASADIIALMLKVIAPYPIATPVADIAAQALTASGIRVMQERVEETIANRAYLQDALDKLILVEKVFPSETNYILVRFTNAEFVFKALWDQGIILRDQQKQPKLENCLRITVGSRSECEQLITAIDALCKQNQQVQETENP

SEQ ID NO: 6677 - protein, 355 aa, Xenorhabdus sp.
MSQKILFIDRDGTLITEPPTDYQVDSLDKLAFESGVIPALLALQKSGYKLVMVTNQDGLGTDSFPMTDFEPPHALMMQVFSSQGIQFEEILICPHKPADNCNCRKPKLGLIEKYLADGMLDTKNSYVIGDRETDLQLARNMGIQGLLYQPESFGWSAICEQLTRKDRYSSVNRTTKETAINIEVWLDREGKSRINTGVGFFDHMLDQIATHGGFRMNIQVDGDLYIDDHHTVEDTGLALGEALKQALGDKLGIARFGFTLPMDECLARCALDISGRPHLEYKAEFKHQRVGDLSTEMIEHFFRSLSYTMGCTLHLKTKGKNDHHRAESLFKVFGRTLRQAIRVEGDTLPSSKGVL

SEQ ID NO: 6678 - protein, 117 aa, Xenorhabdus sp.
MQLLAESSEEGGNIPLLKLISAPVKKMATSGLPLPHMGWNKVNFPSDHPLFHGIENNAYFYFVHSYALPVGEYTIAQTDYGGSFSSAISKHNFFGVQFHPERSGAAGEQLLKNFLEM

SEQ ID NO: 6679 - protein, 245 aa, Xenorhabdus sp.
MIIPALDLIDGNVVRLHQGDYGQCRNYGNSPLSRLQEYEQTGAKLLHLVDLTGAKDPAKRQISLLRELLSGVSVPVQVGGGIRSESDVAALLEAGASRVVIGSTAITQPALVKQWFENYGAESIVLALDVRINTDGIKRVAISGWQESSEATLEQVVEQYLPVGLKHVLCTDISRDGTLNGSNISLYQEISQRYPQVAFQASGGVGCLADIYSLPASGVTGVIVGRALLEGKFTLKEAIQCWQDA

SEQ ID NO: 6680 - protein, 258 aa, Xenorhabdus sp.
MLARRIIPCLDVRDGQVVKGVQFRNHEIIGDIVPLAQRYAQEGADELVFYDITASSYGRVVDKSWVAKVAEVINIPFCVAGGIKTVEDAGQILSFGADKISINSPALSDPSLINRLADRYGVQCIVIGIDTWFDEKSNSYQVYQFTGDEKRTTATTWQTLDWVREVQQRGAGEIVLNMMNQDGVRNGYDLAQLKQVRETCSVPLVASGGAGAPVHFLDAFKQANVDGALAASVFHKQIINIGELKQYLAEQEVEVRIC

SEQ ID NO: 6681 - protein, 219 aa, Xenorhabdus sp.
MLTISPLTPQEIEKLDWEKVDNLMPVIVQHAVSGTVLMMGYMNREALNATLNSGKVTFFSRTKQRLWTKGESSGHFLELSEIYPDCDNDTLLILANPIGPTCHKGTESCFGSAQTQWGFLYQLEQLLASRKNASPDSSYTARLYASGTKRIAQKVGEEGVETALAATVNDREELTNEAADLLYHLLVLLQDQNLDLSCIIRQLQKRHSVKDSAPFSAQE

SEQ ID NO: 6682 - protein, 146 aa, Xenorhabdus sp.
MEHATGGKSEEVAKIRGTHLGQGAKALVCHVKGNNYRQYILAILPADQQADLAVLAKQAGGNRASLASPKEVSELTRCVFGAIPPFSFHPDLKLIADPLLFERYDELAFNAGSLERSIILNTEDYRRIAMPELIAFRKVINQPDLT

SEQ ID NO: 6683 - protein, 388 aa, Xenorhabdus sp.
GKIHCMEWIADPTIWAGLATLIVLEIVLGIANLIFIAILADKLPEKQRDKARLTGLSCALLMRLILLFSLSWLVSLTAPLLALWGHSFSARDSIMLIGGIFLLFKATMELNERLEGKNLHTNQQRKGASFWAVVVQIIVLDAVFSLDSVITAVGMVDHIGIMIAAVIIAMILMIWASKPLTKFVNAHPTIVILCLSFLLMIGFSLVAEGFGYRIPKGYLYAAIGFSIIIEALNQFAQFNRRKFLSASRSLRERTAEAVLHILNGKRESANLDDHASNLIADHEEHKEVFEPQERQMIARVLSLAQRTVSSIMTSRHDVVYLDVHSPMDKLAVLLKQKPHTRIVVTDEKTSDEPLGVMHGIDILNQQLTHHPFDLRQLVQQPLIFPESL

SEQ ID NO: 6684 - protein, 387 aa, Xenorhabdus sp.
VGLGVFWLASTSLYAMDEPAAPEVDAKSYVLMDYASGKILASNNADERLDPASLTKMMTSYVVGQAMKSGKISQDDMVTVGKDAWATGNPALKGSSLMFLKPGDRVKVIDLNRGIVIQSGNDASIALADYVAGSQDAFVDLMNKYSQSLGLTNTHFKTVHGLDASGQYSTARDMAVLGQAMIRDVPEEYALNKEKEFTFNKIRQPNRNRLLWNQNMNVDGIKTGHTSGAGYNLVASATEGPMRLISVVLGASSDRMRFVDSEKLLSWGFRFYETTIPLKADAVFVTQKVWYGTRSEVALGVEKDAAVTLLRGQAGNLKASFTLNQPELEAPLAKNQIVGTVNFMLDGKVVEQHPLVVKDAVEETGFFGRIWDFVVKTVSGWFNSIFS

SEQ ID NO: 6685 - protein, 241 aa, Xenorhabdus sp.
MCGIDCHLLNLVPEIVCAADELEQLMSVDVLVLMLPTSGIAGGGVDYVRAIQLIVDTALSHSVPHIIFTSSTSVYGSSVGHLNEDAPLAPETQSARALVELENWLHQLPNTSVDILRLAGLVGTGRHAGRFLAGRKAISGGENAVNLVHQDDAISAIKLLIQRSEGGNVYNLCAPVHPKRSEFYSQACCQLNLTPPEFLQPEDEGSESDTEKCKTVDGSRICRELGFEYQYPDPGSMPMSL

SEQ ID NO: 6686 - protein, 383 aa, Xenorhabdus sp.
MAISTFFIPPVNKIGEGCLNEAIQLAKTYGYKQALIVTDRVLNEIGVVGKVQNLLTNVGIKSALYDGTNPNPTTINVEEGLAILHQHSCDFVISLGGGSPHDCAKGIALVAANGGDIRDYEGVDVSAKPQLPLIAINTTAGTASEMTRFCIITDVERHIKMAIVDKNVTPILSVNDPSLMIGMPKGLTAATGMDALTHAVEAYVSTAANPITDACALKAVEMISSYLRRAVENGSDVEARENMAYAQFLAGMAFNNASLGYVHAMAHQLGGFYDLPHGVCNAVLLPHVQRFNAKVAAPRLKDIAAAMGANVENVSDQEGAEACIREIRRLAKDVNIPAGLTELNVKVEDLPVLSANALKDACGFTNPIQASHEDIVAIFEEAM

SEQ ID NO: 6687 - protein, 468 aa, Xenorhabdus sp.
MSKQQIGVVGMAVMGRNLALNIESRGYSVSIFNRSSDKTDEVIAENPGKKLVPSYSIEEFVDSLEKPRRILLMVKAGEATDKTIASLTPHLDKGDILIDGGNTYFQNTIRRNRELSAQGFNFIGTGVSGGEEGALKGPSIMPGGQKEAYELVAPILKEIAAQVDGEPCVTYIGADGAGHYVKMVHNGIEYGDMQLIAEAYSLLKHSLNLGNQELADVFSGWNEGELSSYLIEITADIFRKKDEEGKYLVDVILDEAANKGTGKWTSQSSLDLGVPVTLITESVFARYISSLKDQRVAASKVLSGPEAQPFAGDKAEFIEKVRRALYLGKIVSYAQGFQQLKASSDEYNWDLNYGEIAKIFRAGCIIRAQFLQKITDAYNENPAIANLLLAPYFKQIADEYQQALRDVVSYGVQNGIPTPTFSAAISYYDSYRSAVLPANLIQAQRDYFGAHTYKRTDKEGVFHTEWLE

SEQ ID NO: 6688 - protein, 304 aa, Xenorhabdus sp.
ALSNLLRKDSPLDRFGPLPPVGGNPMIHGIEPQEAEVYMDLRERVGHTLVMGTTRVGKTRLAELLITQDIRRGEVVIVFDPKGDADLLRRIWAEAHRAGRGSELSLFHLGWPEISARYNAVGRFGRVSEVASRLAGQLSGEGNSAAFREFAWRFVNIVARALVALGHRPDYTLITRYVNNISELYQLYATKVMADRQPVLLEQINQTLGKLKEKDIPRNMQGQPDALRLWAMEMMLSSEAGKQLYDPILDGLRSAVRYDRTYFDKIVASLLPLLEKLTTGKIAELLSPDYLNMADLRPIFDFRA

SEQ ID NO: 6689 - protein, 158 aa, Xenorhabdus sp.
MSDYSYERKRTKTIWMILLILIAVFSTAIGGYSWWTMKQSGNNSTEKSKNISTPVFMTLEPFTVNLIDNEDHFDRVLYVGVTLRLSDETTRQRFHDYLPEVRSRMLLLLSRQRSTDLAKDDGKVRLVEDIKQTLSPTLIPGEPDQEITDVLFTTFILR

SEQ ID NO: 6690 - protein, 336 aa, Xenorhabdus sp.
MSDNILSQAEIDALLNGDSAAADDVEQTTSSVESEVRPYDPHTQRRVVRERLQSLEIINERFARQFRMGLFNMLRRSPDITVGAIKIQPYHDFARNLSVPTNLNLVHLKPLRGTALFAFDPSLVYIAVDNLFGGDGRFPTKVEGREFTYTEQRIINRMLKLALDAYRDAWDSIFKIDVEYVRSEMQVKFTNITTSPNDIVVTTPFTVEIGDLYGEFNICIPFAMIEPLRELLTNPPVENVRQEDGQWRDILVKQVQNSELELVANFADIPLRLSKILQLKRGDVLPIEKPERLIVHVDGVPVLTSQYGTLNGQYALRVEHLINPVLNALDEEKPNE

SEQ ID NO: 6691 - protein, 135 aa, Xenorhabdus sp.
MSDAKQPADTSLTEESWAEALEQQAAQLASDSGSSIFESLEPQDALSQLSDIDLIMDIPVKLSVELGRTKMTIKQLLKLSQGSVVSLDGLAGEPLDILINGYLIAQGEVVVVSDKYGIRITDIITPSERMRRLSR

SEQ ID NO: 6692 - protein, 141 aa, Xenorhabdus sp.
SGAASDAAPIGTAVTHAPPLSAGQTLMQVSSALGGILLLIFFITWLIRRMGLAPAKNKNHRLLNVKASCSLGAKERVVVVEIEDSWLVLGVTPQQITMLHQLPVPPDDTEKETVLKTLPFGQLLKNKLQRKTRNDRDGDEK

SEQ ID NO: 6693 - protein, 244 aa, Xenorhabdus sp.
RLAAVFMALLLPLFPMNAAAELPGIISQPLANGGQSWSLPVQTLIFITALGFIPAALLMMTSFTRIIIVLGLLRNALGTPSAPPNQVMLGLALFMTFFIMAPVFDKVYQDAYLPFSEDKISLETALEKGSHPVRQFMLRQTRENDLALFSRLANQEAFETADSVPMRILVPAFITSELKTAFQIGFTLFIPFLIIDLVVASVLMALGMMMVPPATISLPFKLMLFVLVDGWQLLLGSLAQSFYV

SEQ ID NO: 6694 - protein, 89 aa, Xenorhabdus sp.
MTPESVMALGVEAMKVALALAAPLLLSALICGLVISLLQAATQINEMTLSFIPKILAVVVTIIVAGPWMLNLLLDYMRTLFSSIPTIIG

SEQ ID NO: 6695 - protein, 260 aa, Xenorhabdus sp.
MIPFDSETLSRLVSDFFWPLARLLALFSIAPIFSEKQMPIKVRIGLALVITALLVPGIPSPQIPIFSVAGIWVLIQQVLIGVALGLTIQIAFAVVRHAGEVLGLQMGLSFATFFDPTGGPNMPILARILNMLMMLLFLAFDGHLWILSILADTFYSIPIQTTQLNSKSFLLLAQSASLIFINGMMLAMPLITLLLVLNFSLGMLNRMTPQLSVFVVGFPLTLTVGIFTLSLLFPMLVPFTERLFSEMFDRLAVIINYMVL

SEQ ID NO: 6696 - protein, 204 aa, Xenorhabdus sp.
FFVKTEDNKWEIHAQDTSVAGSAAQKLGNVEFDNNGRIKGNDNAFAFNMPALNGSNPAAITIDFNGSKQQSIQQDSVSNLQQDGYEAGHFTNYRVDADGKIYGIYSNQQTQVLGQVVLANFSNPEGLASQGDNVWVETGASGSPVVGTAGSGNFGKLISGALEASNVDMSQELVNMIVAQRNYQSNAQTIKTQDQILQTLVSMR

SEQ ID NO: 6697 - protein, 251 aa, Xenorhabdus sp.
MDHVIYTAMGAARQTLEHQAVTANNLANASTPGFKAQLAALRAVPIEGETLPTRTLVVASTPGMDSRQGPMNYTARPLDVAVGQGGYLAVQLEDGTEAYTRNGNIQISPEGQLTVQGRMLMGENGPIDVPPQAELTLAGDGAISALIASDPPTLLGQIGKLKIVKPEAGQVVRGDDGLFHLTPQAREQQGDELAASTEVKIMPGVLEGSNVNPVESMVNMIANARRFEMQMKVIHSSDENAQRANQILAMS

SEQ ID NO: 6698 - protein, 260 aa, Xenorhabdus sp.
MIRSLWVAKTGLDAQQTNMDVIANNLANVSTNGFKRQRAVFEDLLYQTERQPGAMSSEQTNLPSGLQIGTGVRPVATERLHSQGNLAQTNNSKDVAVKGQGFFQIQMPDGTTGYTRDGSFQVDQNGQLVTAGGFQVMPAIIIPDNATKMSIARDGIVSVNVQGQNAPQQIGQLTLTTFINESGLESIGENLYLETNSSGIPVENAPGINGAGLLYQGYVETSNVNVAEELVNMIQVQRAYEINSKAVSTSDQMLQKLTQL

SEQ ID NO: 6699 - protein, 253 aa, Xenorhabdus sp.
MDTMPVAESHTENPMADSCAGLRKNRGNKRRISRTAAVLALSVLTLGGCAYMPHKPLVKGVTTAKPTEAPAPAPNGSVFQTVQPVYYGYQPLFEDRRPRNIGDTLTIILQENVSASKNSSANASRSGKTGFLAAVTPRFLEGVIGGGKTDIEMEGNSEFGGKGGANANNTFRGTITVTVDHLLANGNLHVIGEKQIAINQGTEFIRFSGVVNPRTISGSNTVSSNQVADARIEYVGDGYIMKRSIWAGYNVSL

SEQ ID NO: 6700 - protein, 361 aa, Xenorhabdus sp.
VLVLFNTFAPTSAFAERIRDLTTIEGIRDNALPGYGLVVGLDGTGDQTMQTPFTTQSLNNMLSQLGITVPPGTNMQLKNVAAVMVTGKLPPFARSGQNIDVVVSSLGNAKSLRGGTLLMTPLKGVDNQVYALAQGNILVGGAGVSAGGNSVKINQLAGGRISNGAVIERELPTRFGQKGTLNLQLNEDDFSLAQQISDAVNRLQGVGTATALDSRTVQLRLPIENSEQVKFLSQVQNLNIRVDAGDAKVIFNSRTGSLVMNRNVTLDSCAIAHGSLSVIVERQTAVSQPDTPLAGGNTVVTRNTGVGIQEQGGVLQKVNSSANLTQVIRALNALGATPTDLMSILQAMESAGCLRAKLEII

SEQ ID NO: 6701 - protein, 322 aa, Xenorhabdus sp.
MNDFLSMPTAAYDVNSLHSLKAKLSQEPQQGLRQVAQQLEGVFVQMMLKSMRSSLPQDGMLSSDQTRFYTSMYDQQIAQDLSQKGLGFADMIVKQVSGANSAPSELAGTVPMPLGNDILHTLPTQALEQFLRRAMPEKSLSDKSSSGGTQSKSLPINSSSFVSMLSIPAQIASQQSGIPHLLIIAQAALESGWGQREILTEEGKPSHNLFGIKAGKNWKGAVTNIMTTEYVNGEPQKMRDSFRVYDSYLEAVTDYVRLLTENPRYAKVAQSVTAEQGAHSLQEAGYATDPGYAQKLVSLIQQLKSNGTQMVKAYTYDFDDLF

SEQ ID NO: 6702 - protein, 320 aa, Xenorhabdus sp.
VRVSTNQLYGQKMDGIFGAQSKWMKYGEQLSSGRRVINPSDDPLAASQNIMVSQSESKNQQFTTARIFAKNAMSSQLSITANAVKVTTNVFETLVAAADEQSDQDRSSYAQQLQGFKDELLNLANKTDGNGRYIFAGYKTDVPPFSADKDGKVTYVGGSEKITQKVDDNRSMVIAHTGEQVFLSSPPNPIKEPDGKTASDDIFATIDMAIKALKEPYSSATEEEKNQAAELINKANRGIRNSLNNLSSVEAVLGLQLQELEQLDSLGSERSIANKVRSGELVDVDWTSTISNYYQQQASLQASFKAFTDLKGMSLFEMYR

SEQ ID NO: 6703 - protein, 641 aa, Xenorhabdus sp.
VSDDFAENGILAKTIQGFKPRDAQREMSSAITAAIQNKQQLVVEAGTGTGKTFAYLVPALRSGKKVIISTGSKALQDQLYSRDLPAITDSLAFSGRLALLKGRSNYLCLERLEQQSIGGSQLEPETLSEIITLKNWSSQTEDGDISTCHKIAEDSTVWPLVTSTNDNCLGRDCPNYQECFVLKARRRAMEADIVIVNHHLFMADAVVKDTGFGELIPQAEVMIFDEAHQIPDIASQYFGQQLSSRQLLDLSRDIIMAYRTEVRDQAQLQKSADRLSQSTQDFRLELGENSYRGNLREILQQQHIKRALVRLDDALELCYDVMKLSLGRSAMLDAAFERATIYRNRLKRLIDVTVPDYSYWFESYGRHFLLALTPLSVSDKFSEMIREQPGCWVFTSATLSVNEQLEHFTARLGLKQAQTLLLPSPFDYQRQMLLCVPRHLPLPNQNGGAKWLAGMLKPLIESNKGRCFFLCTSHQMMRSLVEEFRASMTLPVLVQGETSKGKLLSQFLAAGNALLVATGSFWEGVDVRGDALSCVIIDKLPFTAPDDPLLKARIEDCQHKGGDAFSEVQLPDAVLSLKQGVGRLIRDVDDYGVVVICDNRLVMRPYGEVFLNSLPPSPRTRDLSKAVEFLKSRQSQSQYTQ

SEQ ID NO: 6704 - protein, 180 aa, Xenorhabdus sp.
AMALIGCASVPDSIKGATKHPEENLISVKRKPDLYIGHEGRFGGKVLSVLNEKGRTRLEISTMSLASNAAPLIGSPSLGRLYAYVNSFLEPTDFKNHYVTVVGLITGIEKGKVGDSPYNYVVMNVNGFKRWHEIRRISLPPSVGNMWGYYGDPYFNEWIERPEIQSAPVETILTEKHPVE

SEQ ID NO: 6705 - protein, 41 aa, Xenorhabdus sp.
MHKINDKGAVTPDTVANKKENIIILIGVSKFCNEKKTRIKL

SEQ ID NO: 6706 - protein, 55 aa, Xenorhabdus sp.
VIHKAISKKAIRLRLLTHADQSLQDLILSLDGLGVGLIVTLSDDHIDQFLTHIDV

SEQ ID NO: 6707 - protein, 114 aa, Xenorhabdus sp.
MTIKRIDPDTRWSEAVIHNDTIYYTSVPENLDGDITAQTASTLSDIDAMLQRLGSNKSKIIDATIFLADKADFAGMNAAWDDWVVAGHAPVRCTVQAGLMHPKYKVEIKIIAAC

SEQ ID NO: 6708 - protein, 262 aa, Xenorhabdus sp.
MNEQKTILFSCFLLVVGLMAVDFFNPSLPFILKELNTSQESIKNLIVVYMATLGISQLFYGSISDHYGRKPAVVIGFTISIIGLFLSGYSEQINYLYLSRIITAFGAASFTVISRAIIVDVFQGNLKLKKAFSYFSMSSQLSPALAPVFGGWLQMKYNWHISFFTLAVIYFVGLIITLLTMGETRNKELKPSAFLTPYIQLAKNIQFIAFSIASSLIFSYTIGYYSTSPYIFHKLGYSPIENSLFFIIYSAGIIFGSWLLGR

SEQ ID NO: 6709 - protein, 547 aa, Xenorhabdus sp.
MCSKGHRFCYDQLGNILTCTTFLSDGSKDTATFTYNKNDICQLETIKHTHPAYPATIKLSYDRAGRLIQDESGRHLTYDALGRLASVSINNQISDYLYDGIDRLVLQRIGFDKTHEIYYQGVTRVAEVVRESNDAMRFLRAHGESVATVTANDTHLLGCDGNSSVLLSCQGDGSQTHYRYSPYGQQAPDERNPELPSYNGERIDPIWGTYHLGNGYRTYSPVLMRFTAPDSLSPFSVGGINAYAYCLGDPINRSDPSGHVSIFGIIGLILGAIGVAASVATAIASGGLSLVGIGAIAAEVTSFGLVAGSEVTEGSHPILSGILDGLSILAGIIGIGISVAVARGILKVGNKVIIRFNRGLEQSENSLRTAGSANIAEHNSWLQDYNNVRMNGAISKVEGTENLEADISLIREKNWNMMVKLGFNIKRKNNTSLLFNNIVKIEGESGSRSYTLGVNETIFENLYVQYIGKGSINNASSVINELRLITHGLVENVEAELNGAELMKYMSGLWDKGKFTGNFEDWLRSALNSNWTTHDMPEIFKFYNRLI

SEQ ID NO: 6710 - protein, 288 aa, Xenorhabdus sp.
MIVQSSIGLVLMSALYTHFFSRKAGPGQKTEAVPVRRILAISSILAGIGLLSSLDIIGYPFSVYQLLQLHNIMQEWINTETALAAIYFITLSLYTLFVLLTKQSHAYIMAGISVIGLVDIHYMVNIYSNSDIITWTNVNTYFLFYGAVFTLGPALSLSLIGQSGRQFMREKIPTKLLMAALIIVFISVTTRLIEQPAYMGWLVEAVTDGETENIIFPHQPEINLKSAFGFRMITWCLYILAMTIWAYTLWKSRNKTLIRISCPILSGTMIMLVAEIINQYIFFAMSNV

SEQ ID NO: 6711 - protein, 654 aa, Xenorhabdus sp.
MPKLFNPNLNIDALFLGPKSENAVFFKEMIDYAVSEHMHWRSGFHPEDAALVTSVDRYEHNYRETLYRTEGILNQLSAKLKNSSIPFFSPRYLGHINADTLMVSNLAYVMAMMYNPNNCSYEVSPTTTELEIESGLDLCRMFGYDPQRAWGHITSGGTVANYEGLWVARNLKTLPFAISQHPETKNLLSHKSPKQLMNMPTTEVLDLISELKEQGIFNEIRDLTCRGSGVKPEVIGKLLVPQSKHYSWVKAADIFGIGQENIIPLPVNTEYQTDVAKMREITLSLIEKGEAILAMIAMVGTTEVGAIDCIDEVIALRKECEEHYGASFYIHVDAAYAGYACSLLLDEQGKFMEYDELVKKHQELGLTPENIIWPKPAVYRSFKALKHVDSITVDPHKMGFIQYSAGAICMKDKRILDLISSRAAYVFQDSSPQSDSLINNFSNNNKNILGSSIMEGSKSGATAAALWAAHRLLPLNISGYGKVIAAGIVTANWLLNHIKNMQPIKVGKYQFEIHIMPSPDFHMINFSFKEIGNDSLLNHNALNKRLYELCSYSTERAYTNDFITSSTMLGYKDYGDTPRHYAEQCGFSQSEWEKIHHIYVLRAAVMTHCLRDQEHFEEYWEQLKSIFVKKLIQLVDEQEKSLYQKSDFNISFLS

SEQ ID NO: 6712 - protein, 313 aa, Xenorhabdus sp.
MANYQNLLVAIDPNQDDQPALRRAVYIVQRNGGRIKAFLPIYDLSYDMTTLLSPEERNAMRKGVIGQRIAWIKQQAHYYLESGIDIEIKVVWHNRFYEAIIQEVISGKHDLLLKMAHQHSLLESIIFTPLDWHLLRKCPCPVWMVKDQIWPEKGSAVVAVNLSNEESYHNELNLKLVNETQDLANRIVKEPRIHLVSAYPAAPLNIATELPDFDPNVYNRALRGQHLVAMKELRQKFCISEEQTHVQEGLPENVIPEICDELNAGVVVLGILGRTGLSAAFLGNTAEHVIGRLKCDLLAIKPEGFVCPINVDE

SEQ ID NO: 6713 - protein, 264 aa, Xenorhabdus sp.
MKETQMAIDFNAKENRHTYLGRDAQQEWYDIIHSLTEPKGKDIADIGCGGGIYSRAWANLGAKSITCVDFSDQMLADAAENTQELKNITLKKGNALHTGLPANSQDIIFERALIHHISEEDRVICFAETNRLLRSGGIYILQDRTVQDVNLPGSPEHIRGYIFDVYPHLRDFENQRRPDTDNVINGFKEVGFRHVNTLSFLEKRTTYNNFSQLADDFRLRKGRSILHELSDKEIAYLVDYIENTLPSLTNIVENDYWTIWTGIK

SEQ ID NO: 6714 - protein, 86 aa, Xenorhabdus sp.
MLWGYAQGIAAPVSTSILANRAKQNKGQILAVSESFNNLTILFLLPIATVQLTQHSIVATMITLGSCLIAGIGLTLKDFLVTPSLN

SEQ ID NO: 6715 - protein, 372 aa, Xenorhabdus sp.
MKYEDIAVLQLKATYGDLAQKGYHPLKLKKNLAMEQQPIVLTHIPVNNVDYDSTYLRKSECDITGKAPVLYESSIPWLWSPVFSVNCAGVVGGTSGSPVFEKGKTDVIGILNTTTEPGMNGCGSGRPCTIEDNKGVSAEGASYFIPVDSIANAITKDNKLDLSKLENNSGNFLERSQFWSPWVTQSVVDGEKAKWDVVIKEDADVKNIRYKVGLISEIDCKDVSGYGAPVSASQKPLENLLVPEGEGIYKLCAIHQNNSGKWQNAKDASVMLREIDNTPPTTKPTIRYDDHGTDNWFVTIEALPYELSGLTQVKYGPKATTDCEDKSGYAPLWRPVNLAKSEAPWRVCAFSHDVAKNESPISVLDLEAASAK

SEQ ID NO: 6716 - protein, 1013 aa, Xenorhabdus sp.
ITLLCGLLPATASIADNGYQEKGQLNSPDSWLSEEFKRQWGLTAIGAHYAYARGYTGKGITVGVLDQAVTPHAEFANKLRRLGPEDIVSYKYNDDKSGNISFGNHGNHVAGTIVANRDGKEMHGVAFDADLVTAKFLGSYQNRTEAMIQSNVRVINNSWGVRPGYEVDERGNPKRWPNGTVKYKQVTLDHVINEMEPIKGILDHLSHSPIPEIYDELSGTAGLLRAARHHKLVVRSTGNANNYNVTWIDAGIPFFFPDVLKNYLSVANITQDKELALSSTRCGYTASYCLSAPGTLVYSSTGEFVPKSGGAINEGALNRGELEIDSSYGLKTGTSMAAPHVVGAAAVLMQRFPYMTAGQISDVLKTTATIINKEGKRIHELSGWGMLNLKDAIDGPKMFITKDDIPAEFYIENSYTDTQFVANIVGMGEKVEAGTTVERVCNSIECTYDYWSHDISGHGGLTKTGKGMLELTGKNSTYQGPTIVDQGQLQVSGGITSEVTIHKGATFSGNGTVGFLIAKSGSYIAPGNVGPMNTDLIGTLKVNNDVTFESGSNYLVEIARNTAGLSDRIYADGLATLRGGSVEVKFENSSNLLSKPEVRSLLGQQYNILQAHKGINGQFTAASPDYLFIGTQLSYQPNRVMLDINRNATPFASVTKTTNERAIANAAEKLHLGHPVYESILMSDTVAQAGKAFQQLSSGQIHADIASAQINGSRYLRDTLNTRLRQADTGLASQDIKADQNGVWAQITSNWQRTNSNSEANGYRMSNYGVFLGADREVANDLRLGMATGFTRSSLRGGDNTSAGSDNFHLAFYGSKQLDALALRTGVAYSWHRFDTERSVAFGRQSDNLKAKYGAQTGQLFAEAAYGVNPGWLNLEPFANLSQVNFRNDGINEKGGAAALTGKKQSKNATLSTLGLRVNQNWQTQDQLTVGMYGELGWQHQFGNVARDSQLSFSNSDVSFTVNSVSAARDAAVMKAGTSLSINENTQLSVGYNGILSSSHKDNGVFFNANWKF

SEQ ID NO: 6717 - protein, 177 aa, Xenorhabdus sp.
ERSVAFGSQSDNLKAKYGAQPGQLFAETAYGINPDWLNLEPFANLSHVNFRNDGINEKGGAAALTGKKQSKNATLSTLGLRVNQNWQTQDQLTVDMYGELGWQHQFGNVKRDSQLSFSNSDVSFTVNSVSAERDAAVIKAGTSLSINENTKLSVGYNGVLSRGHKDNGVFLNANWKF

SEQ ID NO: 6718 - protein, 255 aa, Xenorhabdus sp.
IFSCAVFFIGTTEFMLAPILQPLAEAFNTTTDKAAWLVSGYAFSYSLMAPVFGWLSDRINRPKLLLASLLFLSLDGLLLTIAPNLVVAIGLRIFGGIAAAALIPTIFALIAEIFPLHRQASAMGIVMLGMTMGIVTGPVFAGILTEKLNWQMPFLISGAGCFLLCILSQKQVLHLKYNSHQPSEKEKIKLPLIKFQWISQGDLIRPLIAKGLWNGTAVSAFILSGEVLRRYYELATDTIGISVSVFGIGLGIGNL

SEQ ID NO: 6719 - protein, 200 aa, Xenorhabdus sp.
MGAMLSGLCRVLTGVRVRWVGCQPSTKSRIYYANHSSHLDGLVIWSGLPSVLRHLVHPVAARDYWDKTKLRRYLIHKVFCAVLIERQGENSNRKEILAPLERVLAQGESLIIFPEGTRGNGEQINPFKSGLYHLARKYPDAELIPVYLENLNRALPKGKRILIPVICSATFGQPLDKLADDESKEAFLQRAQTALEELVL

SEQ ID NO: 6720 - protein, 62 aa, Xenorhabdus sp.
VLIIASVIGGILSLCYSGEKRNATIDNLNARIRGWWMMCIVCVLAVVIGPIGSVVLFSGMAL

SEQ ID NO: 6721 - protein, 352 aa, Xenorhabdus sp.
VRNFMGQSDNSDHPKKKKYGRVEIMGPFSIRDGEDYYHLYLLRPTNSPQSDFINLMFDRPLLLPAATMLISAPLLLWLAWSLARPARKLKNAADQVAKGNLKQHPELESGPQEFLAAGSSFNQMISALERMVTAQQRLISDISHELRTPLTRLQLATALLRRRHGESKELERIETEAQLLDSMINDLLVLSRNQHKNELLRENIKANKIWNDILENAKFEVEQMHKTLDIVSPPGPWVIYCNPAVLGSALENIVRNAVRYSRSHIAVAFKADNHGVTITVDDDGPGVSPEDREHIFRPFYRTDEARDRESGGTGLGLAIVETAVEQHRGWVKAEDSPLGGLRLVIWLPLHGR

SEQ ID NO: 6722 - protein, 392 aa, Xenorhabdus sp.
WSTFFVGGYISLVYVTGVTRYKNLFFALIALAALYWIIKNPKGCLAALKNNLVLALGIFTLTTIYSVIISPDPKLSFHEIKTPFFRDVVLSAVLITLALSQTDKLKIQKMIIGSFLLGLLFITMKEMYLFYQDYQNGIMPFTNYNHRNIAHGVVFFFPALVALWHFQKPQNYIRLVLTILLILSVSFVLLGTLARGAWLAVFVMFFIMILMNKNWKTSFVSIIIICAALFAIKHGYLAKEATLNYKLTQTDSSYRYTNGTQGSALNLILENPLKGYGAGGKIYDQIYNDNVKNYPNWTFKESLGPHNIFLTEWFAAGILGLGGFLFLIFIFLKQSGKQWRHDNGSYKQAALILLISFTGYFIVRGNFETVHLNTLGIYFGLLLALCQKRLNE

SEQ ID NO: 6723 - protein, 265 aa, Xenorhabdus sp.
FSVLISVYIKEKPEFFDSALLSIYEQTYKSNEIIIVQDGELTPELYEVIDKWKKKLPIKDIILSENKGLGEALNVGLNSCTHDIIMRVDTDDINEPDRFENQYIYMEKNPQITVCGSHIAEFDKDPSNIKSYRRVPLGNEIHCVINKRNPINHMTTCFRKKHVLSVGGYKHLLYMEDYYLWIRLYAKGFKLENLDKVLVLARTGENMLKRRRGLAYFKSEINMLMKILNLGIGKRYSTIVCFSFRAIIRLIPSSILSKIYSLIRK

SEQ ID NO: 6724 - protein, 147 aa, Xenorhabdus sp.
KKVITYGTYDLFHVGHIRLLKRLKALGDYLIVVISTDDFNQIKGKKSFFSYEERKEIVESCKYVDMVLPENTWEQKRDDIINNNVSILGMGDDWSGHFDDLKDICDVIYLKRTEHISTTKIKNKLSIITPQKLQELEKSVHNIFDIV

SEQ ID NO: 6725 - protein, 362 aa, Xenorhabdus sp.
PKKELIIFTFDKENIKFNSKALFEYSLKENLIAVKYIINNDTKRKELIKKYGDYFITTTKTRDIIEISNAKIWITDGGFPLKTPFGHKKRTLINLWHGIPLKKIGIMGYSGLSKIRVYLTLKMFSRHYSLLSSTSSNLSSIYSKSFLINKNKIKPLGQPRNDALFQSNSTINEYIYNLPEYDKAILYAPTWRSGLYGDEWAGEDTKFFPFSDFDQKKLEEYLEKNKILLCLRPHHLQKIKIKNSKWIKNLSSDICNEIMDIIREFDLLITDYSSIYFDFLILNKPLLFLPYDLDLYEKNVGLNFNYQTVTPGPKPTNQKEFIYEISKLLLEKEYFQLERMKINKFFNEVQYNNCQRIYDIII

SEQ ID NO: 6726 - protein, 254 aa, Xenorhabdus sp.
FFKDVKLVYFAHGGNNEFEKFYMARKSTKHRVKMIFDVFDDVICLFKNTETTPDVVKDEKITFISNPCPIPTYIRKKHEYSNIVTYIGRVTKEKGVDDLIKAWALIEYKHHDWKLEIIGDGCDKNHFISLSKQLRLKNILFYNSTNSIEKHLKKSTICVLPSLFEGFGLSLIEAQSQGCAVISTKTNGGKRIIRQMENGILIDISDTKDLADKIERLITDKKLRNKLISQAYSEIKFFEITYIAKDWDKVFSDD

SEQ ID NO: 6727 - protein, 312 aa, Xenorhabdus sp.
KMINIIGGSGFIGTRLATQLKLENIPFKIIDIYKSESFPNSWEYGDVTKQETLIKPLEGATVIINLAAEHKDNVTPIKLYYDVNVGGAKNVCNIAEILNIKHIIFTSSVAVYGFVEKETDENGRFNAFNDYGKSKLEAEHVYNAWQEKILDRALVTIRPTVVFGENNRGNVYNLFKQIASGRFLMIGSGNNKKSMAYVENVAAFLKFSTQFKSGRHTFNYVDKPDFTMNELTEVICNSLDKKNSKFRIPYSVGILGGYFFDLLSKITRKELPVSSIRVKKFCARTQFKSNTISETGFMPPTTLEKGIEKTVK

SEQ ID NO: 6728 - protein, 60 aa, Xenorhabdus sp.
VQGKDAVSLVDFKRRKSFFWLREEPKPADWEAQVAAILAEVERFGPPHVSVSEKTSKEQI

SEQ ID NO: 6729 - protein, 493 aa, Xenorhabdus sp.
LNNMKYRDLRDFLSLLEQSGELKRISMEVDPYLEMTEIADRTLRAGGPALLFENPKGYSMPVLCNLFGTPKRVAMGMGQDDVKALHDVGKLLAFLKEPEPPKGFRDLVGKLPKFKQVLNMPTKRLSSAPCQELVWEGDDVDLTRIPVMHCWPEDAAPLITWGLTVTRGPNKERQNLGIYRQQVLGKNKLIMRWLSHRGGALDFQEWCQAHPGERFPVSVALGADPATILGAVTPVPDTLSEYAFAGLLRGHKTEVVKCLSNELEVPASAEIILEGYIEPGEMAPEGPYGDHTGYYNEIDMFPVFTITHITQRRDAIYHSTYTGRPPDEPAVLGVALNEVLVPILQKQFPEIVDFYLPPEGCSYRLAVVTMKKQYAGHAKRVMMGVWSYLRQFMYTKFVIVCDDDINARDWNDVIWAITTRMDPQRDTVLMENTPIDYLDFASPVSGLGSKMGLDATNKWPGETQREWGRPIVMSDEIRARVDEIWDQLDILKR

SEQ ID NO: 6730 - protein, 233 aa, Xenorhabdus sp.
MTTLSCKVTSVDSITDTVYRVRLLPDSPFSFRAGQYLMVVMDERDKRPFSMASSPSEKQTIELHIGASELNLYAMAVMDRILDQKVIDIDIPHGQAWFREDSKNPMLLIAGGTGFSYTRSILLAALENDPEREIAIYWGGRELQHLYDLGELQSLSEHYSNLTVVPVVEQADGNWRGRTGTVLSAVLEDFGNLAPYDIYIAGRFEMAKIARERFCSERDASLERMYGDAFEFI

SEQ ID NO: 6731 - protein, 444 aa, Xenorhabdus sp.
MEKLASLYQEHIKILQKRAKEILARSQLDALLIHSGELLRVFLDDSHYPFKANAHFKAWVPVTKVPNCWLWIDGVNKPKLWFYSPVDYWHSVEPLPHGYWTEEVEMFHLASAEDINTALNGFSKQHMAYIGEQVERAKSLGISEHNLNPKAVLDYLSFHRSYKTDYELACMREAQKTAVNGHMAAHDAFLSGVSEFEINMFYLIATGHRDTDVPYDNIIALNENAAVLHYTKLQQTVPAEIRSFLIDAGAEYNGYAADITRTYAAKSNSEFASLIKGLNDEQQAIITTIKAGTRYTDYHINMHYRIARLLKKHYIINGISEEAMVEKGLTAPFFPHGLGHPLGLQVHDSAGFMQDDTGTHLAAPEMYPYLRCTRVLEPRMVLTIEPGLYFIETLLAPWRVSEYSKHFDWKKIEALKPYGGIRIEDNIVIHDGKIENMTRDLQLP

SEQ ID NO: 6732 - protein, 90 aa, Xenorhabdus sp.
VKAYGNGVQQALKLLEKEYKVPQKQYQIQCEYAQISMVEQLLQQFSGQVLASEYTENVTLQVSLPATLADEIGNKLRDLSRGSLFLTSKK

SEQ ID NO: 6733 - protein, 483 aa, Xenorhabdus sp.
MHFRTITRIVGLLVIIFSVTMIIPGLVALIYRDGAGRAFSQTFIFALLIGLVLWVPNREQKYELKPKEGFLIVVLFWTVLGSVGALPFIFSEKPNLSITDAFFESFSGLTTTGATTLVGLDSLPKAILFYRQMLQWLGGMGIIVLAVAILPLLGVGGMQLYRAEMPGPLKDNKMRPRIAETAKTLWLIYVLLTIACAVALWAAGMSVFDAISHSFSTIAIGGFSTHDASVGFFNSPTINTIIAIFLLISGCNFGLHFAVLSGRSLKVYWRDPEFRMFISIQLALVIICMLVLWQHSVYESKLNALNHAFFQVVSMATTAGFTTDSFAKWPLFLPFLLLCSAFVGGCAGSTGGGLKVIRILLLFLQGSRELKRLVHPNAVYTIKLGRRALPEKIIEAVWGFFSAYALVFIISMLLLIATGVDEFSAFSAIAATLNNLGPGLGTVADNFTTMNPTAKWVLVVTMLFGRLEVFTLLVLFTPTFWRD

SEQ ID NO: 6734 - protein, 178 aa, Xenorhabdus sp.
  unsure (1)..(178): unsure at all Xaa locations
MNYLLLYSTQDGQTKKIIMRIAENIRRAGINCDLRDLATVNHMNLLPYNKVMIGASIRYGNFNSVLHKFVVRHQKQLNQLTTAFFSVNLTARKPEKRTPETNAYVRKFLVKSPWQPDLCDVFAGALLYPRYRWFDRIMIQLIMRMTGGETDTTKEIEYTDWAQVDLFXRLFTIEFRAQ

SEQ ID NO: 6735 - protein, 387 aa, Xenorhabdus sp.
MENVVIIDGIRTPMGRSKGGVFRQTRAEDLSAHLMKSLLKRNPSVQPEQIDDISWGCVQQTLEQGFNIARNAALLAGLPHSVPAVTVNRLCGSSMQSLHDATRMIMTGDANIAMIGGVEHMGHVPMTHGVDFHPKLSRNVAKAAGVMGLTAEMLAKMHGISREMQDEFAMRSHQRAAQATESKAFASEIAPLHGHDADGNIQLVNFDEVIRPDTNLKDLAGLRPVFDPVTGSVTAGNSSALSDGASAMLVMSESKARELGLKPRARIRSMAVVGCDPSIMGYGPVPATQMALKKAGLALSDIDLFELNEAFAAQSLACMKGLNLLDSMDDKINLNGGAIALGHPLGCSGTRITTTLLNLMERKDVQFGLATMCIGLGQGIATIIERV

SEQ ID NO: 6736 - protein, 728 aa, Xenorhabdus sp.
MLYLSETIQVNWLKDGIAELIFNASAAINKLDTKTVASLDKAIATLEQQSELKGLLIRSEKQAFIVGADITEFLSLFSAPAEKLHELLNLANNIFNRIEDLAVPTVSAINGYALGGGCELVLATDFRVASPDLRIGLPETKLGIMPGFGGSVRMPRLIGTDNALEIITAGKDIGAEEALKNGLVDAVVPTEKLVDSAVSILEQAIKGDLDWKAARQPKLVPLSLNAIERTMSFTVAKGMVMKVAGPHYPAPITAVKTIEKAATLNRDEALKLESDSFVMLAHTSVARALVGIFLNDQYVKGLAKKHLKEVSTPQQAAVLGAGIMGGGIAYQSARKGVPVLMKDINQKALDLGMNEAAKLLNKQFERGRLDAMKMAKILSSIQPTLNYAGIEQSQVVVEAVVENPKIKAAVLAETESHINDDCILASNTSTIPITELAKSLKRPENFCGMHFFNPVHRMPLVEVIRGEKTSEKTISAVVAYASKMGKTPIVVNDCPGFFVNRVLFPYLAGFGMLLRDGGDFRQIDKIMEKEFGWPMGPAYLIDVVGIDTAHHAQSVMAQGFPERMSRDYRDAIDVLFENQRYGQKNGVGFYKYTQDRKGKPKKEQDETTDQLLAGVSQPKQTFSGEDIIARTMIPMINEVVRCLEEGVIASPAEADMALVYGLGFPPFHGGVFRYLDTMGTAAYVKLAESYAHLGALYQVPAGLKAKAESNESYYPAAAKLAVNSGETA

SEQ ID NO: 6737 - protein, 872 aa, Xenorhabdus sp.
MTQQRLVKHRLDYKAPDYTITDIDLDFELDADKTTVTATSQVKRLINDITPLILDGENLTLKSIHINDKAWEHYQEQDGKLIIEQLPAQFTLKIVNENNPAANSALEGLYVSGDALCTQCEAEGFRNITYYLDRPDVLARFTTRLTADKSKYPYLLSNGNRIEQGELSDGRHWVKWQDPFPKPSYLFALVAGDFDVLHDTFTTRSGRKVALELFVDRGNLDRAGWAMTSLKNSMKWDESRFGLEYDLDIYMIVAVDFFNMGAMENKGLNVFNSKYVLAKTETATDKDYLGIEAVIGHEYFHNWTGNRITCRDWFQLSLKEGLTVFRDQEFSSDLGSRSVNRINNVRIMRAAQFAEDASPMAHPIRPEQVMEMNNFYTLTVYEKGSEVIRMIHTLLGEEQFQAGIQLYVHRHDGSAATCDDFVQAMEDASNVDLTLFRRWYSQSGTPVLTVRDEYDAEKHQYLLHVSQMTPPTADQKEKLPLHIPLDIELYDEHGRVIPLRRDGQPVHHVLNVISTEQTFVFDDVPSQPVPSLLREFSAPVKLDYLYSDSQLTFLMKYARNEFSRWDAAQALLANYIKLNVTRYQQSQPVELPIHVIDAFRAVLLDKDIDPALAALILTLPSENEVAELFTVIDPQAIHEVLDVITRSLANEMADEFAAVYHSIHTGAYRVEHKDIAKRSLRNICLHYLAFVEDQAQADKLVAAQYYQADNMTDTVAALSAAMAAELPCSYQLMDEFDQRWHQDGLVMDKWFMIQATSPAFDVLDKVRSLMSHRSFSLSNPNRTYSLLRTFFANNAVAFHAENGRGYQFLKEVLTDLNTRNPQVASRLIEPLIRLNRYDEKRQALMRTTLEELKTLENLSGDLFEKITKALES

SEQ ID NO: 6738 - protein, 336 aa, Xenorhabdus sp.
MYYPLLKKALFQLDPEQAHELTFRQLKLVTGTPFEFLIRQSVATKPVTCMGLSFKNPLGLAAGLDKNGDCIDAFGAMGFGFVEIGTVTPRPQAGNDKPRLFRVVEAEGIINRMGFNNLGVDNLVENVKKAKYDGIIGINIGKNKDTPVENGKDDYLICMDKVYPHAGYITINISSPNTPGLRTLQYGEALDDLLSAIKNKQSELQQKYQKYVPVAVKISPDLTESELVEIADSLMRHQIDGVIATNTTLDRKIIEGLNHCQQAGGLSGRPVQLRSTEIIRRLSQELKGEIPIIGVGGIDSLVSAREKMEAGASLIQIFSGFIYKGPKLIKDIVNHI

SEQ ID NO: 6739 - protein, 183 aa, Xenorhabdus sp.
MKIRPDDQWRWYFDTEHNRVMLDLANGMVFRSRFPARMLTAYVTTMKEINFSVDDAALYYTFEEYSRRINIAPQLRAELALNGLVAFRFMKPQMPKSWYFSICSLINKPEQGEIIQVRLQEDGTEALFMVAEAGENASVCLLVEQKLDLGDRVMNFCDPIKIMNDRLMPYTEPTQAPIYDKAI

SEQ ID NO: 6740 - protein, 636 aa, Xenorhabdus sp.
MSLINLSGAWLSFGDSPLLDDTELHIEENERVCLVGRNGAGKSTLLRVLAKEQPLDDGQVIYEQDLIVARLQQDPPRDVEGTVFDFVAEGVKEQAEYIKAFHHTSRLVETDPSEKNLNRLAELQEVLDTRNLWLLDSRISDVLKQLALPAEAKLSSLSGGWLRKAALGRALVSSPKVLFLDEPTNHLDIETIEWLENFLKDFNGSLVFISHDRSFIRSMATRIIDLDRGKLTSWPGNYDKYLEGKEEALRVEDLQNAEFDKKLAQEEVWIRQGIKARRTRNEGRVRALKALRVERSERRNVMGSARMQVEEATRSGKIVFELENVNYQIGDKTLVKNFSAQIQRGDKIALVGPNGCGKTTLLKLMLGDLKADSGRLHCGTKLEVAYFDQHRAALDPDKTVMDNLAEGKQEVMVNGRPRHVLGYLQDFLFHPKRAMTPVRALSGGERNRLLLARLFLKPSNLLILDEPTNDLDVETLELLEELVDGYTGTVILVSHDRQFVDNSVTECWIFEGNGEINNYVGGYFDAQQQRAQTVSLRQSSAKKEKAESKPAKVKETTKRSNNKISYHLLRELEQLPSLLETLEQEIEQLQAKVSDPDFFNQSHEVTQNVLQDLANKEQSLEKAFDRWQELEMMKNG

SEQ ID NO: 6741 - protein, 554 aa, Xenorhabdus sp.
MGNHKVTDKEEALAQAKISKLKSWSPIWIVPIITVLIGAWILFYHFSHQGPEVILITSNAEGIEAGKTKIKSRSVNVGVVERVSLSDNLGEVIIKARLNDGMERLLHKDTAFWVVKPQIGREGVSGLSTLLSGVFIELQPGSEGSGERKFSLLDSPPLASPDAKGMRLILTSEKAGRLSAGDPVLFRGYRVGSVETSTFDPKSRLARYQIFINSPYDGLLTTNIRFWKDSGVAFDVSSQGVRVEVAALSTLFAGGVSFDVPKGWDLGKPVQEKEIFRLYDNERNIENSLYTEHRDFLLFFSDSIRGLQPGAPVEFRGIRVGTVAKVPFYADGIKQRLDNDFRIPVLIHMEPERFEKEIGDGFYTDKELEKIISRGLRASLKSGNLLTGALFIDLDFYADEKVWKGPREIAGYEILPTTSSGLAQIQQKVTMALDKINQMPIEPLFIQATQTLKESQKTIKAAQKTMDELNRILASKEAQGLPKDLHNTLNELNRSMQGIQPGSQAYNKLVDNMQRLDQVLRELQPILKTLNNKSNALVFEAEATQDPEPKKAHN

SEQ ID NO: 6742 - protein, 185 aa, Xenorhabdus sp.
LLIGGMLLSGCSSSQPQKTYYQLPVVTKSSEVKRVNIEHEPQLWIKKVSLADYLASPGIVYQTGDVSYINATNHLWASPLEQQLQQILTTQLSAAFPQRLVSDQLLEKNADILDITITAFHGRYDGRVIIQGYWLLSNQKETVKRAFNLELKQTENGYAQLVRTLSMGYNQLIQSIASQISYTKG

SEQ ID NO: 6743 - protein, 361 aa, Xenorhabdus sp.
MSVAPVVDVLQARVPVGSEVTVRGWVRTRTDSKAGISFLAVYDGSCFNPLQAVVNNNLPNYQDEVLNLTTGCSVEVTGTVVESQGKGQSFELQATNIVVVGMVEDPDTYPMAAKRHSIEYLREVAHLRPRTNLIGAVARVRHTLAQALHRFYHEKGFFWVSSPLITASDTEGAGEMFRVSTLDMQNLPLTDKGEVDFSKDFFGREAFLTVSGQLNGETYACALSKVYTFGPTFRAENSNTSRHLAEFWMLEPEVAFADLNDIAKLAEEMLKYVFKVALEERADDLAFFAERVDSEVITRLEKFVDSDFVQLDYTDAIEILENCGHKFENPVYWGVDLSSEHERYLAEKHFGAPVIMKNYPF

SEQ ID NO: 6744 - protein, 404 aa, Xenorhabdus sp.
MTLDATPIIKSLLDTDAYKFHMQQAVYHHYNDIHVVAEFRCRGDELLGKYAGALRQQINMMADLTLTEQEAEYLSGLPFFKQDYLDWFKTFRFNPEQVEVSVTDKGQLAIRISGLWREVILWEVPLLALISELVHRDRSPEIKAEAAVSQLRKLIELFYQDAAAEHIDLSGFKLMDFGTRRRFSHEVQYAIVKELKESFPYLIGTSNYQLAQQLDLAPLGTQAHEWFQAHQQISPELANSQRAALQTWLNEYPNQLGIALTDCITMDAFLRDFDKPFAVAYNGLRHDSGDPVDWGEKAIAHYLSLGIDPLTKTLVFSDSLDLQKSLALYRHFHQRINVMFGIGTRLTCNIPGIKPLNIVIKLVECNGKPVAKLSDSPGKTICEDVEFVNRLRRAFDIPEMKKAV

SEQ ID NO: 6745 - protein, 406 aa, Xenorhabdus sp.
DNHQHDRLVLCYQCDMLVALPDLEEGKKAVCPRCDTLLTAKWKEPHNQPTGYAVSALFMLFLACLFPFVSMNVAGIVSEITLTEIPKTMFSEDYSSLAVFFLIFVQLVPAFCMLSIILLCQNIKMALRLKIELARILFQMKTWCMAEIFLAGVLVSFVKLMAYGDIAVGLSFLPYCLFCLFQIRAFQCLDRYWIWNDIKSAPKIRLPLQTGKPGLIQGVRLCQCCTAILPAQKHQCPRCHSKGHARRHYSLQWTMALLITSAILYIPANMLPIMVTQSLGSDINSTILEGIILLWSTGSYPVALVIFIASIMVPLLKMLAICWLCWDAKRHGRYNSETMHFIYEIVEFVGRWSMIDVFVIAVLSALVRMGQFMSIYPATGAILFASVVILTMFASMTFDPRLTWDK

SEQ ID NO: 6746 - protein, 196 aa, Xenorhabdus sp.
MKKAIFFLLNDYADWESAYLASRLNINKEWLVETASLESGTCKSIRGFSTVIIYPLEKIPRDIESVVLIGGNSWNIENNELKSLITFYLTSGIIVGAICGTVDFLARNGLLNNFQHTGNSQYLWNEYKEYKNGENFIKEQTVTDRNLITANGTAAIEFSEQILKAIYSEKKEEIEKEHELFKVGYYNYCNKYGDPF

SEQ ID NO: 6747 - protein, 348 aa, Xenorhabdus sp.
FDKDIRHIEIDLGDSGLRYQPGDSLGVWFENDPVLVDELTGLLHLEGTETVTVHGKSLALREALTSHLELTQNTGVIVEKYAVLTKDESLLALISEKSTLQQYAQKTPIVDMVRQAAQQPEAQQFIDILRPLTPRLYSIASSQDEVENEVHITVGVVRYDIDGRARTGGASGYLADRLQEDDNIRVFIEHNDNFRLPADPQTPVIMIGPGTGVAPFRAFLQQRDNQGAEGKNWLFFGNPHFVEDFLYQVEFQRYVKEGLLTRIDLAWSRDQKHKVYVQDKLREQAEEIWRWISEGAHLYICGDANRMAKDVEQALLDIISQQGGIDAEQADEFLSELRLERRYQRDVY

SEQ ID NO: 6748 - protein, 579 aa, Xenorhabdus sp.
MKTMSNEKQGPLIVEGKLADSERMKSESNYLRGTISEDLKNGLTGGFEGDNFLLIRFHGMYQQDDRDIRAERAEQKLEPRHAMMLRCRLPGGIITPRQWLGIDQFATESTLYGSIRLTNRQTFQFHGILKNNVKPAHQLLAQMGLDSLATANDVNRNVLCTSNPVQSALHQQAYEWAKKISEHLLPRTNAYAEIWLDKEKIATTDEEPILGKTYLPRKFKTSVVIPPQNDVDLHANDMNFVAIAENDQLIGFNVLVGGGLAMTHGDKNTFPRLASEFGYIPLEHTLAIAESIVTTQRDWGNRTERKNAKTKYTLERVGVETFRQEVEKRAGVKFEPVRPYEFTGRGDQIGWLKGIDDQWHLTLFIENGRLLDYPDKPLKTGVAEIARIHKGDFRLTANQNLIVAGVAENEKARIESIARAHGLIDDGVTSLRHHSMACVSFPTCPLAMAEAERFLPTFVDHVDALMAKHGVSHEHIVLRVTGCPNGCGRAMLAEVGLVGKAPDRYNLHLGGNRNGSRIPRMYQENITSAEILTILDELIGRWATERNENEDFGDFLIRTDIIKPVLNSAIDFYDWQEAV

SEQ ID NO: 6749 - protein, 228 aa, Xenorhabdus sp.
RTEVLAETNQQLELLDARQRVLWALEHLPGEFVLSSSFGIQAAVCLHLVTQEYPDIPVILTDTGYLFPETYQFIDKLADKLNLNLKIFRAEQSPIWQEARFGKLWEQGVDGIERYNQINKVEPMNRALKTLDAQTWFAGLRRQQSESRANLPVLAVQRSVYKILPIIDWDNRKVHQYLTEHGLEYHPLWEQGYLSVGDTHTTKKWEPGMSEEQTRFFGLKRECGLHEG

SEQ ID NO: 6750 - protein, 119 aa, Xenorhabdus sp.
VEPNISTHFDDGGPSESQIYNAIQDLYDKTESDGETEKEAFFLESVKKIGNCTPVATEPTKMNCPVDVTAGWQGGANSIPQKYTFNQYISIWQENGNWVADSRVKSRIQLVMLFSIRKG

SEQ ID NO: 6751 - protein, 487 aa, Xenorhabdus sp.
VDYLPLFVELKSRAVLLVGGGEVASRKASLLLRAGAALTVVAPELHSELQQRHQKGDFEWRQGTFRTDYLDGVFLVLAATDDHDLNQFIFTEANRRAILVNVVDDQSLCSAIFPSIIDRSPVMVAISSAGKSPVLTRLLREKLESLLPFHLGAMAEIAGRWRGKVKQSLNSLRQRRYFWEKAFNGRFATLVANGQLQQAEEQLAQQIADEQQKQTSKQGELVLVGAGPGDPGLLTLKGLQVIQQADVVLYDHLVSDEILELVRRDADKICVGKRAGSHSVAQEETNTLIVKLANQGKKVVRLKGGDPFIFGRGGEELQVAESAGIPFQVVPGITAAVGASAYAGIPLTHREHSQSVTFITGHCRENGNELDWPALARGNQTLAIYMGIIKSALISQKLISHGRDASTPVAVIGCGTRAEQQVLTGTLSELEQLAQEAPSPALLVVGEVAQLHHQLAWFGLKSVDHQNLAEHTESTEPANRPAVVDLA

SEQ ID NO: 6752 - protein, 302 aa, Xenorhabdus sp.
MDNKRLTHLQQLEAESIHIIREVAAEFANPVMLYSIGKDSSVMLHLARKAFYPGKLPFPLLHVDTGWKFREMYEFRDKTAEKYGFELLVYRNPQGEELGINPFIHGSAKHTDVMKTEGLKQALDKYGFDAAFGGARRDEEKSRAKERIYSFRDRSHRWDPKNQRPELWRNYNGQINKGESIRVFPLSNWTELDIWQYIYLEQIDIVPLYFAKPRPIVQRDGTLIMVDDNRIDLKAGEVISQRKVRFRTLGCWPLTGAVESEAETLPEIIEEMLISTTSERQGRLIDSDQSGSMELKKRQGYF

SEQ ID NO: 6753 - protein, 480 aa, Xenorhabdus sp.
MPALAHNEVIANQIREQGGVESYLRAQQEKGLLRFLTCGSVDDGKSTLIGRLLHDTSQIYEDQLATLQNDSKRLGTQGEKLDLALLVDGLAAEREQGITIDVAYRYFSTEKRKFIIADTPGHEQYTRNMATGASTSDLSILLIDARKGVQEQTRRHSFISTLLGIRYLVVAVNKMDLVEYRQDIFDRIKQDYLDFASQLPTDLHIYFVPISALEGDNIVSHSEKMPWHSGATLLDLLETVDVQKNASEQPLRFPVQYVNRPDLDFRGYSGTLSSGILRQGQKIKVMPSGRVSTVERIVTFDGDLTFAVSGQAITIVLKDEIDISRGDLLVAVESQMTVARHALVDVVWMSEKPLIQGQSLDIKVAGKKSRAKIDNVQYQVDINNLTQKVAVELPLNAIGLVEFSFDEPLLIDSYQQSADTGGIILIDRLTNVTVGAGLVREIQTDVYQEPHEYSEFELEFNRLVRRHFPHWGARDLLGGK

SEQ ID NO: 6754 - protein, 179 aa, Xenorhabdus sp.
VNGHPALVIWFTGLSGSGKSTLAGILEQALFSQGIKTYLLDGDNLRHGLCNDLGFSEADRQENIRRVGEVAKLMLDAGLVVLTAFISPNRAERQKIRQSVEPEQFIEVFVDTPLEICESRDPKGLYKKARAGEILNFTGIDSDYEAPEHPDIHLDGSQPIELLMEELLISLNERNILTT

SEQ ID NO: 6755 - protein, 106 aa, Xenorhabdus sp.
MGKLTLLLLVLLGWLQYSLWIGKNGIHDYMRVKDEVAKQEKNNLFLKSRNDQLFAEIKDLKGGQQAIEERARNELGMIKPGESFYRMVPDTTKQNAQQASGQNNEK

SEQ ID NO: 6756 - protein, 259 aa, Xenorhabdus sp.
EIVALIPAAGIGSRMQSECPKQYLSIAEKTIIEHTLSALLEHPRIQQAIVVLHPADKQFNQLPIASDPRITTVIGGNERADSVLAGLNYLAGLSPECPDWVLVHDAARPCLHRNDLDNLLKLLDEKSASSVLSGGPFDDERFCGGLLAAPVRDTMKRMMAASSGRITETAPQVVDHTVDRSGLWHALTPQLFPLQLLRDCLMKALAERACITDESSALEYCGYHPALVSGRADNIKVTQPEDLALAEFYLSRKSKERIV

SEQ ID NO: 6757 - protein, 129 aa, Xenorhabdus sp.
MRIGHGFDVHKFGGEGPLIIGGVRIPYEQGLIAHSDGDVALHAATDALLGAAALGDIGKLFPDTDPAFKGADSRELLKEAYRRIREKGYRIGNLDITIIAQAPKMLPHIPQMRVNLAQDLECHMDDINV

SEQ ID NO: 6758 - protein, 50 aa, Xenorhabdus sp.
MYPLFIFHGDPVGGMSIKEKSTNAEDNDWVDYTKKYFGILWYTHKFGVPL

SEQ ID NO: 6759 - protein, 49 aa, Xenorhabdus sp.
MNIGIGIGIGIGIGIGIGIGIGIGIGIGIGIGIGIGIGIGIGIGIITTN

SEQ ID NO: 6760 - protein, 232 aa, Xenorhabdus sp.
WGMLSEQETRRVLAATDDNNPLSVRDRAMMEMLWSSGLRRSEIQRLQVTEVDFAHGLLFVRQGKGRKDRVVPFGESAQHWLQRYLNDVRPRLIWGRDPGYLFVSQHGKALAEGTMTQIVRNALHRADIDKPGGCHLFRHSMATQMLENGADTRHIQAILGHASLETTQIYTQVAIGHLKAVHQKTHPAERVTELLPKADNPIAAPENSTTCAGGEPDTEPTPPCSGQPARPR

SEQ ID NO: 6761 - protein, 269 aa, Xenorhabdus sp.
TTLRQHIQHYLEHLDALRYTRETRLHYQGNLMQFVRWCDERGITTAQQVSFPQLESWQRGLAAPKNRHGRPIAASTLVKKLTSVRNLFSWLTKRQHLLYNPARDLELPRQERRLPWGMLSEQETRRVLAATDDNNPLSVRDRAMMEMLWSSGLRRSEIQRLQVTEVDFAHGLLFVRQGKGRKDRVVPFGESAQHWLQRYLNDVRPRLIWGRDPGYLFVSQHGKALAEGTMTQIVRNALHRADIDKPGGCHLFRHSMATQMLENGADNEF

SEQ ID NO: 6762 - protein, 151 aa, Xenorhabdus sp.
MLKIFNTLSRQKEEFKPIHEGKVGMYVCGITIYDLCHIGHGRTFIAFDVIARYLRYSGYDLTYVRNITDIDDKIIKRAIENNESCDALTTRMVNEMHNDFDALNIMRPDSEPRAMQHIPEIIELTELLIKRGHAYVADNGDVMFSIDSNPN

SEQ ID NO: 6763 - protein, 45 aa, Xenorhabdus sp.
MDGCLVLIPDSDDTRTIKQQYQRQQDQLSEIKLRMRELIGDYNSN

SEQ ID NO: 6764 - protein, 116 aa, Xenorhabdus sp.
MEIFATRLREAREARRMTQARLADLLTVNRRVYNRWERGSSVPQLDTVVKIAQVLQMSVDALVGLELPQKPKIHNPKLQALYEQIDSLSDEDQQALIVLMDSLVTRAKMEKLIAGQ

SEQ ID NO: 6765 - protein, 341 aa, Xenorhabdus sp.
MLRQAGEPLGIAVYPIGLDAEPESVPYQSSIITAEIERWPETALTRELSHHKAFINRDIFPLLADRLPQKQLLNTLGLATAPWKLLSDPSQWPQIFSELGDFTIVKRRVGGYDGRGQWRIRPGKETDLPTEIYGECIVEQGIPFSGEVSLVGARNADGESVFYPLTHNFHQEGILRTSVAFTNANRQLQQQAEQMLSGIMDHLNYIGVMAMECFIVGDELLINELAPRVHNSGHWTQNGASISQFELHLRAILNLPMPQPEVLSPSVMVNLIGTEINPEWLSLPLVHLHWYGKEVRPGRKVGHLNLVHQEQDALKATLQDLISLLPTEYQNGLEWVQSKLS

SEQ ID NO: 6766 - protein, 240 aa, Xenorhabdus sp.
MSTLFIADLHLSEQEPAITAGFLRFLREDAIHAESLYILGDFFDYWIGDDDPNPLHAQIAQALNSLKQKGVSCYFIHGNRDFLLSSRFAKESGLILLPQEKVLELYGKRILILHGDTLCTDDTGYQQYRKRVHTPWIQRLFLLLPLFIRLKIAARMRAGSQYANSQKSESIMDVNQQTVIEHFNKYQVDWMIHGHTHRPAIHDIPIGDKILHRGVLGAWHHQGSMFKVTETSIELVSFPF

SEQ ID NO: 6767 - protein, 164 aa, Xenorhabdus sp.
MVTFHTNFGDIVINTFAEKAPVTVENFLNYCREGFYDNTIFHRVINGFMIQGGGFEPGMKQKTTKSPIQNEANNGLQNSLGTLAMARTNDPHSATAQFFINVVDNDFLNFRSERPDGWGYCVFAEVVEGMEVVDKIKGVSTGRSGMHQDVPHEDVIVERVTVSE

SEQ ID NO: 6768 - protein, 222 aa, Xenorhabdus sp.
MSSLSTEAALVHSALVERGLETPLREQTLEPEVRKVRIEEHMTEIMKLLNLDLSDDSLADTPSRIAKMYVDEIFSGLDYRNFPKITLIENKMKVDEMVTVRDITLTSTCEHHFVTIDGKATVAYIPKDKVIGLSKINRIVQFFAQRPQVQERLTQQILIALQALLGTNNVAVSIDAVHYCVKARGIRDATSTTTTTSLGGLFKSSQNTRQEFLRAVRHLHLS

SEQ ID NO: 6769 - protein, 374 aa, Xenorhabdus sp.
RIAVLDSVRGFAVLGILLLNISGFALPYAAYTNLFYKANVLFSDVLTWSVLNTFAQGKFLFILTLLFGASLELLRQRDHYWNRCRLVILAVIGLLHGILLWDGDILLSYGLVGLLVLHWINKRPNLFKQGIVLYLFGLMMFYLLGLFPVEENSTFWHPLEQDILHESYWKTHGGLVAIEHRINQISGVMIVTIVQYSWQIIGTMLCGAMLLRNGWLKGMYSLHHYRRAALWLFVIGLLIQSLALSVLYLYPYSYFTAWTVRQTITELATPFIALSYVALIYGFWPVIFRCRVVFWLQQVGKMALSCYLMQTLICTTLFYHLGLFNQFARWELLIFVPFIWGCNIGFACWWLKRYQQGPAEKLWRVLTRKLQERF

SEQ ID NO: 6770 - protein, 374 aa, Xenorhabdus sp.
KGAGMNSQSPEQTNPDLLKESVAKILTAFKHPTLEQDLMTLKALHHCTVLDGVLHIELMMPFVWKRAFGALKEETTQLLLDATGAKGVEWRLSHDICTLRRANNLPGINGVRNILAVSSGKGGVGKSSTAVNLVLALAQEGAKVGILDADIYGPSVPSMLGTAKERPTSPDGQHMAPIMVHGMATNSIGYLVTDDNAMVWRGPMASKALMQMLQDTLWPDLDYLVIDMPPGTGDIQLTLSQNIPVTGALVVTTPQDIALIDAMKGIVMFQKVSVPVLGIIENMSTHICNNCGHHEAIFGTGGAEKLAEKYECQLLGKIPLHISLRKDLDRGEPTVISQPDSQFADIYREIAANIAAQMYWQGEKIPTEISFRAV

SEQ ID NO: 6771 - protein, 240 aa, Xenorhabdus sp.
MWKYLITSLILIIAVFILSAVMLDRWISWKTAPYIFDDLRQLPEREVGMVLGTSKYYKAGAYNQYYFYRIQGAVNAYNSEKVKYLLLSGDNAQHSYNEPNTMRRDLIKAGIPASKIVMDFAGFRTLDSVVRTRKVFDTNDFTIITQRFHCERALFIAMHMGIEAQCYAVSSPKNMMTIRFREVFARLGAWADLYILKREPRFLGPLTPIPSQQISPTGIEGYPAVSPEELQGMETRNRSK

SEQ ID NO: 6772 - protein, 570 aa, Xenorhabdus sp.
QRVSIMELEHESKRPLYIPYAGPILLEFPLLNKGSAFTEEERSNFNLHGLLPQAVETIEEQAERAYRQYRDFKNDADKHIYLRNIQDTNETLFYRLLDAHLSEMMPIIYTPTVGEACEHFSDIYRRARGLFISYPNRAYIDDMLQNATKQNVKVIVVTDGERILGLGDQGIGGMGIPIGKLSLYTSCGGISPAYTLPVVLDVGTNNPQRLNDPLYMGWRHPRITGKEYDDFVDEFIQAVKRRWPNVLLQFEDFAQNNAMPLLTRYRNDLCCFNDDIQGTAAVALGSLIAASRAAGRQLKDQTVTFLGAGSAGCGIAEQIIAQMKSEGLSDEQARARVFMVDRFGLLTDKQPNLLDFQSVLVQKSSALDSWDVDKDSLSLMDVVRNAKPTVLIGVSGQSGLFTEEIIREMHKHCERPIVMPLSNPTSRVEARPEDIINWTEGKALVATGSPFSPVQYEGQEFPIAQCNNSYIFPGIGLGVIASGARRVTDDMLMAASRSLADCSPLAQTGSGPLLPLIDDIQDVSRKIAKEVAKKAQIQGVATVTSEDALEEAIERNFWKPEYRIYKRTSF

SEQ ID NO: 6773 - protein, 294 aa, Xenorhabdus sp.
MQARFHAIWSEITPELQKALLPYIGNDDFPAMLTAEQVESIKQTCGLDDHALALALLPLAAACAISPISNFHVGAIARGESGNLYFGANMEFTGVALQQTVHAEQSAITHAWLRGEKKLVSITINYSPCGHCRQFMNELNSGTQLEICLPDRPRLTLADYLPEAFGPRDLSVTQFLLDNTHHGYQLDAEDELVLAALNAANQSHAPYSQSHSGVALIDEQDRVYTGRYAENAAFNPSLPPLQAALILMNMSGSDCHSIKRAILVEGQNGHLSQWNTTESTLNFLGCKQTERHTF

SEQ ID NO: 6774 - protein, 231 aa, Xenorhabdus sp.
MLSHIWWSLPLTLSVFYVAKKLAVRLKFPIFNPLLISMAVIIPLLLLTHTPYKHYFAGSEILNDLLQPAVVALAFPLYEQLHQIRAQWKSLISICFIGSITAMITGTAIALWAGATPEIAASILPKSVTTPIAMAVAHSIGGIPAISAACVIAVGILGAIFGHNLFNVLKIKTKASRGLAMGTASHAIGTARCAEIDHVEGAYSSLALMTCGVITSLVAPFLFPVLLHLFS

SEQ ID NO: 6775 - protein, 676 aa, Xenorhabdus sp.
TMSQVAKKLLVTCALPYANGPIHLGHILEHIQADIWVRYHRMRGKEVHFVCADDAHGTPIMLKAQQAGITPEEMIDKVHLEHQQDFAGFAISYDNYHSTHSEENRALASEIYLKLKKNGYIKNRTISQLFDPEKSMFLPDRFVKGTCPKCKSEDQYGDNCEVCGTTYAPTELINPRSVVSGATPEMRETEHFFFDLPAFSDMLQQWTRSGTLQEQVANKMQEWFESGLQQWDITRDAPYFGFEIPDEPGKYFYVWLDAPIGYMGSFQNLCNKRDDLNFDEFWKKDSKTDLYHFIGKDIVYFHSLFWPAMLEGSNYRKPTNVFVHGYITVNGTKMSKSRGTFIKAETYLKHLDADCLRYYYAAKLSSRIDDIDLNLEDFVQRVNSDIVNKVVNLASRNAGFINKRFGGKLADKLADPALYQKFVDAAQGIEDDFTNREFGKAVREIMALADLANRYVDEQAPWVIAKQEGRDADLQAVCSMGINLFRVLMTYLKPILPGLTERAEAFLNTELTWDGISQPLLSHNISPFKALFNRIEMAKVEAMVADSTESIKPQKTVTGPLADDPIQDTITFDDFAKVDMRIALIKQADFVDGSDKLLRLVLDLGGETRQVFSGIRSAYPDPKALENRLTVMVANLAPRKMRFGISEGMVMAAGPGGKEIFLLSPDSGAQPGMQVK

SEQ ID NO: 6776 - protein, 41 aa, Xenorhabdus sp.
MSHTLLWAKFGGISISPAINDYINRATNRVAYLKAQEKNNQ

SEQ ID NO: 6777 - protein, 253 aa, Xenorhabdus sp.
NRCKNRLEKNLTCFGLFLVSASSLIAECCAVRGPDWLLVDMEASPADRHDLIQMLQAMNGSRSTGMARVARNDRQQIEAALDSGAMGLMVPKVESAAEAKMVADSVYYPPKGKRGINPIRCSGYFSRLPDYFAEANDSLLTIVQIESARAVAAADEIAAVDGIDVLFIGSGDLASDLGQAGQVESPEMEQAFECVLEACRKHGKTPGIFANSVELARRYASQGFRFIAVGNDLKLIASGLEQQMYGLEGTDSA

SEQ ID NO: 6778 - protein, 352 aa, Xenorhabdus sp.
MKTKIAVQELRELGQAALIRANTPAEVATLVMDDLLENELTSYPSHGVLRLADYIGDIQSGVLNPAAIPAVSLTMPNIAIVDGCRAFGVLVRQELILVLQKLALKHGIAIACLRDAHHLGRLAAIGRSLAGFNDQPLAVIGFSNYQGNGARVAPTGGHLARLCTNPLLLAFPTNTADPFVLDMSTSTVSEGFIRRHVQENKPVPPGCLVDAKKNDILDPSSLYDVPPRATIQPLGGNLAGHKGYGLAVAMELFCGALAGAGHVARPGAPGNGGLFLVIDPSRMPGGIDTIRSEAEAIMNYCRDSGRPEAPARMPGEGYFTRHNEAKNTITLSLPTSVLTEIRHLAGVIQKEV

SEQ ID NO: 6779 - protein, 435 aa, Xenorhabdus sp.
LQWLEETQYLSLRECRKLQMEKLHTLLTHAYESVPYYTRVFNERGLRPDDFNSLSDLAKLPLLTRQELTQHQADLISTRANHATLQTNYSSGSTGKRACFVQDANFRLWMRAHQLRTYQWCSGWKVGEPFALLWGSSIYWSLKSVSDRLKNLLSNRREFNTFRLSPELIGEFTRNLASFNPVLISTYTNAMHLIARQMERESIRVPALRAIQGTSEPLPPIIRERLQRVFRCEVYDKYGSRETNIVSHESPHHDGMLIQVENVAEEFLRDDGSACQPGETGRVVLTTLNNFAMPLIRYETSDLASPMAGNCTSGLGLPRMSHVAGRQQDLILTPDGAYIDAYLFSFLIMRFEEIEWFQVVQDSLESLRIRLMVPTGISRQRCDEIVERIHHHAGYPFHIEFEQLDRMPDSPTGKFRLCVSALSDIGTSNQTTVNS

SEQ ID NO: 6780 - protein, 214 aa, Xenorhabdus sp.
MLDDTSNYMMVDSFKGAPVNMRVFESFNPFYVWPSPSIPVPGQPKRLARSVESVWQGVKLVDGITDFNQFLGQPTKRPEDHERRQLKDYCYADSLFVYGDRLLDLLSARFLIYLPTYLFILEKLVPEALLRELNQHLTSVGPVLFYDWDSNQNITDTSSSFSHSALLASWFNGTFENDYWTLAHRVLQENDWLTFDASIKNLLNRYYAMQREKL

SEQ ID NO: 6781 - protein, 160 aa, Xenorhabdus sp.
MMLEKEDLNYQWSFHTHGDWLLPLQQQAEEHPDCYVACVVKDNREIVADWMGESWDVATSLLTKLSDGSDSNNRVENGLAVYLSDLPRLDELALYAKAGVSFVVVPFPVLPDYLKAEARRLGIRLQDWGRENKYKQPRPQWILEEHSDSQHIYIREVNAG

SEQ ID NO: 6782 - protein, 126 aa, Xenorhabdus sp.
LDNKFTEFNAFNLISWIAVIGGIVVYLSGLWRSDMQLNEKGYYFAILILGLFSSISIQKTVRDKADNIPTTQAYYIACIIAFLSSIALIAIGLFNADLLPSEKGFYGIAFFLCLFGSIAVQKNIRD

SEQ ID NO: 6783 - protein, 128 aa, Xenorhabdus sp.
LLIGWQYLRAFALLYLCLIVGNFTSAHLPFSLPGSIIGLLLLFCLLSLQIVPAHWVKPGCNLLMKNMTLLFLPIGVGVMQYYPQLSQQIVPIALSCIISTVIVMITVAYSSHYIHRERTIIGARQADQ

SEQ ID NO: 6784 - protein, 301 aa, Xenorhabdus sp.
MVMESGHFDFTGSMVAIITPMDSTGRVDKSSLKKLIDYHVASGTASIVSVGTTGECATLNHDEHVDVVLTTLELADGRIPVIAGTGANATAEAISLTRCFENTGVVGCLSVTPYYNKPSQEGLYQHYKAIAENTDLPQILYNVPSRTGCDLLPPTVARLAKLKNIVAIKEATGNLSRVSQIQELVNDESFILLSGDDASFLDFMYLGGKGTISVTANVAAAEMAQICQLASRGEFAKARSLNSSLQELHHKLFVEPSPAPAKWACHKLGLIASDTLRLPMVPLTQEGQISVENALKMAELL

SEQ ID NO: 6785 - protein, 349 aa, Xenorhabdus sp.
LMATLLQKSKVMKVAGLSLVVLLAACSSDQSYKHQVSGDESYLDTPPLKLLNVPAGMNLPLQNGEYDIPSVDPQGNVGKSVDIRPPLQAVALLAGSRVENSVQSSKLLLENTPEYSKLWSQVNSFLAEKGYPISQKDDTAQTLTTDWILWPRSDENVPYKVRYHISVVQQGYQIVLTVSGAGLEQGDKAVSTPSEIQRYNTLMLNALTGYLNDQKEASAQHNTQDDGALSVQSGGDNTGLPQIIVRAPYNVIWNRLPYALESIGMQVNDRTRSTGAIEVTYKGLSSSGWKALGVEAPTISEGNYKLQVGDLDNRSSLQFISEKGKPLTQSENDQMVEVLQAAFSKATNK

SEQ ID NO: 6786 - protein, 237 aa, Xenorhabdus sp.
MQKKAELYRGKAKTVYATDNPDLLVLEFRNDTSALDGERIEQFDRKGMVNNKFNHFIMSKLEEAGIPTQLEQLLSDNESLVKKLDMVPVECVIRNRAAGSLVKRLGVEEGMILNPPLFDLFLKDDDKHDPMVNESYCETFGWVSKEHLAEMKRLSYKANEVLGKLFDDAGLILVDFKLEFGLFKGKVVLGDEFSPDGSRLWDKQTMDKMDKDRFRQSLGGLIEAYEEVAHRIGVILD

SEQ ID NO: 6787 - protein, 737 aa, Xenorhabdus sp.
MTGMDFEWKTLQEQMQRQGQRRLLVLSGENQWSEKIVASLKNQLQGDWITIASGTPGYVEPIKAVGLLGREFLHGVFDATRGFNAEALAILAGTLKAGSWLVMRVPVWSQWVDLPDEDSSRWNESAGVIPTSHFIQHIQQQLLNSPDCLIWRQGKPFQASLLPQTRSWKMPDGNPTTGQQLILEQMLQASQGVWVVTAPRGRGKSALAGILARQWQGSCWLCAPAKITTEVIRRYAESFNNNLEDGLQNSDTVSGAQQIPFWSVDNLLKFIRENACRQQGNTDTQQSNADWLLIDEAAAIPTPQLSELIRHFPRVLMTTTVQGYEGTGRGFLLKFCAALPDCQIRELKTPMRWSENDPLEKWLDNVLLFDDSNLFSSSLPDPNIENGLFFQSIDQAEWLQQPQLLRQFYGLLASAHYRTSPLDLRRLLDGNGMTFLAAMSSSDNANPQLIGALWMVNEGGLSPALAHEIWAGRRRPRGNLVAQSLAAHAGFPQAAVMRSQRVSRIAVQAQYRRMGIAQRLITQQCQVARIKKLDFISVSFGYTAKLWSLWQKCGFQLVRMGTHLEASSGCYTAMAILPLSEQGEWLARAAQQQLSRDASWLKSLTGFALPVEHNDDHQLNENDWRELAGFAFAHRSLSSSYFALQRLLLASDLALPALRKHLQQKIEIEQCAYELSLNGRKALLKCWREETAHALANIDEILARQWNDWVISSDHPFDDHSFYHSPEASRPHHPMKH

SEQ ID NO: 6788 - protein, 380 aa, Xenorhabdus sp.
VYASSYQPEDFDKIYIANFEHLEELISQLRKYNPLCILTGCESGVELAEKLIPLIVPKYTNIKELALARRDKGLMAKAVIDAGIPMMKQICSSDFAEVEQWLHSCKLTHKDLVIKPPKSASTDGVKKIHYGEGLEKSFYDLLNKYNRLGIINDRVIVQEYLYGTEYVVDTFSYNSIHTICSICKYTKLNNANGMAIYDQMEWVSPDENIVEILTAYAEKVLGALGVVFGNSHIEIMLTKEGPRLIEIGARPHGGGHPRFCFIATGDSQIHRSARFFARKELPPKKYNLLKNMTIVFLHAMQSSVVKNVKKLDYINKLPSHLESNIKINDRQLVPATQDLFSTLELGFIVLMSDDPLQIQMDIEKIRQIEMNVFVTNSEII

SEQ ID NO: 6789 - protein, 473 aa, Xenorhabdus sp.
INQKDVDNLIRLVGGQENIASVTHCITRLRFVLNTPENADAKAIEELPMVKGCFTNAGQFQVVIGTNVDIYYKALLAATGKQSANKEEVKQAARQNMKWYENAISHFAEIFFPLLPALISGGLILGLRNLIGGIPFSDGKPLSDIYPIWQTIYDFLWLIGEAIFFYLPVGICWSAVKKMGGTPILGIILGITLVSPQLMNAYQLGQQIPEVWNFGWFTISKVGYQAQVIPSLMAGLALGWIEIRLKKLVPDYLYLVVVPVVSLLLAVFLAHAIIGPIGRSIGDGVAWCVKGLMTGSFAPIGAALFGFFYAPLVITGVHQTTLAIDLQMIQSTGGTPIWPIIALSNIAQGSAVIGIIWASKKQNERELSVPAAISAYLGVTEPAMYGINLKYRYPMFCAMIGTSLAGLLCGLNHVTSNGIGVGGIPGILSIKPQFWVIYLLAMLIVIIVPMALTVLMYRRNERKAELINNEAAS

SEQ ID NO: 6790 - protein, 509 aa, Xenorhabdus sp.
MTEQQPWWLDSAIYQIYPKSFQDSTGNGTGDINGITQRLDYLQHLGVGAIWITPIYPSPQVDNGYDVADYCAINPEYGTMEDFDNLVENAHRRGIRIILDMVFNHTSTEHPWFKAAQDANSPYRQFYIWKEGGGQDNPPNNWKSKFGGNAWQWHAASQQYYLHLFAVEQADLNWEHEPVRSELKKVCEFWADRGVDGLRLDVINLVSKQQDYPDDDRGDGRRFYTDGPRIHEFLQEMSRDVFQPKALMTVGEMSSTSLEHCVRYSALSGNTLSMTFNFHHLKVDYPNGEKWTHAKPDYIELKKIFSVWQQGMHQKAWNALFWCNHDQPRIVSRFGDEKQHHKTSAKMLAMVLHGMQGTPYIYQGEELGMTNPHFKRIEEYRDIESLNMYQERIEQGMSSEEILTILAQKSRDNSRTPMQWDNTDNAGFTSGTPWIATSDNYREINAESVLQDKDSVFYCYQDLIQLRKTQPILTYGDYLDLLPEHPSLWCYLRRWQDQTLLVIANLSDE

SEQ ID NO: 6791 - protein, 35 aa, Xenorhabdus sp.
MTESYIIDVNESSRNQVYRFCMQQKGWKQKTNYWL

SEQ ID NO: 6792 - protein, 223 aa, Xenorhabdus sp.
MMSPEMLTGLSTEHLMALSGGHHLQFDATKAFLAMQRDAANAGFKLQPASSFRDFSRQQAIWNEKYRGQRPVLDADSQPLDISEMTEGEICEAILRWSALPGASRHHWGTELDIYDPFLLPQGKKLLLEPWEYEAGGYFEPLTNWLTENMSRYDFYRPFTRDCALGVAYEPWHISYWPLSHEAECLFNEQTLLNAWQGRDIAGIDWLTANLSYVFKKYVKTEG

SEQ ID NO: 6793 - protein, 378 aa, Xenorhabdus sp.
MTCPVIELTQQLIKRPSVSPDDQGCQEIMIQRLQNAGFTIERMPFGDTLNFWAYHGTGATFALAGHTDIVPAGDISEWQSPPFEPTIRDGMLYGRGAADMKGSLAAMVVAAERFVAENPNHQGRLAFLITSDEEAHAINGTVKVVEALMARHERLDYCLVGEPSSQKRLGDMIKNGRRGSLTATVTINGIQGHVAYPQFADNPIHSSLPFLQELVNTKWDDGNEFFPATSMQIVNINAGTGSNNVIPGKLKVQFNFRFSTELTDTEIRQRVESMLKKYNLKHDIEWWLSGQPFLTCKGELVDATIEAISHYCGYKPELSTSGGTSDGRFIARTGAQVVELGPINATIHKTNECVSVSDLQELSLIYQRIMEQLSNDVA

SEQ ID NO: 6794 - protein, 126 aa, Xenorhabdus sp.
TLYGIKNCDTVKKARRWLEDQEIPYQFHDYRADGLSPDLLQLFIEQLGWESLLNTRGTTWRKLTDEQKSAINNAEAAKALMLEQPAIIKRPLLASQEENTSQKTGSYLLGFKAEQYQQFFSRDSIQ

SEQ ID NO: 6795 - protein, 129 aa, Xenorhabdus sp.
SHNMTVTLAMLFLLIVRITPLNQFFPWVEKYGLTLGILILTIGVMAPIASGKISAQDIFSSFLNWKSLLAIAVGVLVSWLGSRGVSLMSNQPSTVAGLLVGTVLGVALFKGVPVGPLIAAGILSIVIGK

SEQ ID NO: 6796 - protein, 249 aa, Xenorhabdus sp.
YQKLASEFPYKIPKDIKWSQYNISTDGKYLKFRIYEPLHIDNDGLIIYIRGGGFVVGSLDSHHSVTAEIASKTQVRVMAVDFRLAPENPFPHSLEDCYNAVIYAQKNASSLGINPNNIIIAGDSSGANMAVVIAMMCRDRNGPKFVGQALISPVLDFTRWRNGGNDAPLLTGGEMEFYTACYVSDPSIISHPYISPLIYGEFHELPTAYIMGAEKDPLVIDAQEYTNKLNSNGIDVELIIEPGLVHSAI

SEQ ID NO: 6797 - protein, 389 aa, Xenorhabdus sp.
FNLLWAGQSFSLIGNQFLVISLPLLAVQIVGASAAEAALLPFLMFMPFLLFGLPIGALVDRLPKRNTMIFMDIIQMVIYILIAVLAMGGLISFPILMGLVFFAGLATEIFQVAYSSFLPEIYQGKTELQKGNAKLFFSESIARTLGPVAAGSIITLFSLPVAVLLNGISFLISALTLGGIRNSNNKSISSGIHKRLPLITEIKLGLKFVFSHPKLEPVFFCGAIYVLFLTIIETSLVLYCKDILHLSPVGIGIVIGAAAAGFPIANLLSPKLVNYFGISHTLVIATTISVSGLFLIAVSGAVGSLAGLIAASILHGLGEGVFGPTSLTLRQTDTPTELLGRVNSVQRFMIWGAIPLGSLLTSLIIKYIGLEWTLWTGGIGTILCLIPLI

SEQ ID NO: 6798 - protein, 199 aa, Xenorhabdus sp.
LRTRTTLREVLQRLARDGWLTIQHGKPTKVNNFWETSGLNILETLARLDHDRVPQLVDNLLSVRTNIAAIFIRTAFRHNPEKALEVLAEKDKAEDTAESFSSVDYDIFRGLAFASGNPIYGLIINGLKGLYTRVGRYYFSNPEARKLALNFYQQLSVLCREEAYDKIMECVRNYGKESGTIWHEMQGIMFNDLTAARQN

SEQ ID NO: 6799 - protein, 77 aa, Xenorhabdus sp.
MTDVIKNSECIQYVSLAPGDVLIINNRICLHGRSSITDTAKFNGEDRWLIRIYGYKKHSTDFMKIRQGSDHIMEVDI

SEQ ID NO: 6800 - protein, 370 aa, Xenorhabdus sp.
QYENMFRILDKADLLSGDSSVVTEYETSLKEFFNVKYAIAVSSGTAALHASITQVINPGDEVLVPAICVPMTISAVLQAGGIPVFYDCSRNSFYPELASLEKHTNSSTRALITVAMWGYSAINKEIKDYAKKHKITIIEDAAQAAGTHGKQGYEGTIGDIGCFSTHEFKLISTGEGGFVLTNSEQFAKNIQEFTHIGFCAEAKSFGHKNGLNYKLSSFQAAVGIDQLSIIESKIQERNKKAEQWRENLSSGSELTFMNSHYDISHNGYGLCTFLHSNTNLTGIELARQLNAVGINTDTYRYKNTIVCNYPFLKEFYLTPRYSGRNEIDFPNATNLVKRMLVLPCHDQVTDSAIDIASEQILSLLRKNSST

SEQ ID NO: 6801 - protein, 298 aa, Xenorhabdus sp.
MNHDFSSVNKETRSNRKRIFNKNHVLNKQRIANKINTKPSKPGIKLLSALILFSLSGIQFAYSKPIEFNTDALDINERSNIDLEKFSRAGYIMPGNYMMAVRVNQSELQDMYPIDFLVPDNDPKGSEACISPELVKRIGLQSKWADKLVWQNNEKCLDLNSLPGTLVKGDLATYTLYLVVPKIYLEYESPNWDPPSRWDEGVPGLLFDYNLYAQATKPDHGNARQQISANGTTGINAGAWRFRANWQSRYDHTNTGKNDSDDTNRSSSRKRSWDWNRNYAYRALPTMEAKLTMGESSL

SEQ ID NO: 6802 - protein, 181 aa, Xenorhabdus sp.
MKLNKLAMVLGLGVALTAGAANAGGSDDNMNDRGFVHFKGSIINPTCSIKNSHIDVNFGEVRTSKFKSNPDGQSERIPFDIILDKCSDITGKKISTTFTGDTVDANGDLLAIKGKAKGVGIQIGDLNDGENGRLVRFGTPTTGVDAVDNRLRFDANLKVIPGQTVTTGDFYAFAYFTLNYL

SEQ ID NO: 6803 - protein, 238 aa, Xenorhabdus sp.
MATPHINAEMGDFADVVLMPGDPLRAKYIAETFLEDVRQVNDVRGMLGFTGTYKGRRISVMGHGMGIPSCSIYAKELITEFGVKKIIRIGSCGAVSEDVKIRDVVIGMGACTDSKVNRLRFKDHDFAAIADFDLIRNAVDAAKAKNINARVGNIFSADLFYTPDPQMFDVMEKYGILGVEMEAAGIYGVAAEFGAKALAICTVSDHIRTGEQTTAEERQTTFNDMIEIALESILLGDN

SEQ ID NO: 6804 - protein, 407 aa, Xenorhabdus sp.
MKRTFIMVLDSFGIGASADAERFGDKGSNTLGHIAEQCARGEADIGRQGLLKLPNLSRLGLGKATEESSGTFPVGLDKDAEIIGAYGYASELSSGKDTPSGHWEIAGVPVLFDWGYFHELENSFPQELLDKLVERANLPGYLGNCHSSGTVILDKLGEEHMKTGKPIFYTSADSVFQIACHEETFGLDKLYELCEIAREELTDGGYNIGRVIARPFVGDKAGNFQRTGNRHDLAVEPPAPTVLKKLVDEKQGEVVSIGKIADIYANVGITKKVKATGIDALFDASLVEMEQAGDNTIVFTNFVDFDSSYGHRRDVAGYAAALELFDRRLPEMLEQVKEDDILILTADHGCDPTWPGTDHTREHIPVLVYGPKVKPGSLGHRETFADIGQTVAKYFDLTPMDYGKVMF

SEQ ID NO: 6805 - protein, 455 aa, Xenorhabdus sp.
LFLAQEIIRKKRDGFSLSEEEIRFFINAVRDNTVSEGQIAALAMAIYFRDMTMEERIALTLAVRDSGTVLDWKKLNLPGPVVDKHSTGGVGDVTSLMLGPMVAACGGYVPMISGRGLGHTGGTLDKLESIPGFDIFPDDHRFRDIIRDVGVAIIGQTNSLAPADKRFYATRDITATVDSIPLITASILGKKLAEGLDALVMDVKVGSGAFMPTYEQSEQLAESIVAVANGAGCKTTALLTDMNQVLASSAGNALEVREAVQFLTGEYRNSRLFEVTMALSAEMLVSGKLAEDRDAAYRQLQAVLDNGKAAEIFGRMVAAQKGPVDFIENYDRYLPTASFSRPVFAENNIIKKQSIVTEMDTRALGMAVVALGGGRRKATDPINYSVGLSDIIALGSEVNTDTPLMVIHANNEDDWHMAAEAVRASLVFQQAHTSAAEVDAGMKVATQMVYRRIGG

SEQ ID NO: 6806 - protein, 259 aa, Xenorhabdus sp.
MTDLTAAAQRALSLMDLTTLNDDDTDEKVTALCHQANSPAGHTAAICIYPRFIPLARKVLREQGTPDIRIATVTNFPHGNDDIDIALAETRAAIAYGADEVDVVFPYRALMAGNEQIGFDLVKACKEACAESGVWLKVIIETGELKEAALIRKASEISIKAGADFIKTSTGKVPVNATLESAEIMLSVIRDIDVGETVGFKPAGGVRTAEEAAQYLALAGRIMGDKWADSRHFRFGASSLLGSLLTALGHQGQKQSSSY

SEQ ID NO: 6807 - protein, 425 aa, Xenorhabdus sp.
MQLIMSLIGMVVLIFIAVLFSSNYKAIKIRTVLGAFLIQVLIGAFVLYVPAGKDILIGMSKGVSNVIGYGQEGIDFIFGGLVSNKMFELFGGGGFVFALRVLPVIVFFSSLIAVLYYIGLMQLIIKILGGGLQKILGTSRTESLSATANIFVGQTEAPLVVRPYISTMTQSELFAVMCGGLASVAGSVLAGYASMGVPLEYLIAASFMAAPGGLLFAKLMVPETETTHDNVDAMSLVSAEDRPANIIDAAASGAASGMQLALNVGAMLLAFTALIALLNGMLGGIGGWFSYPQLSMELILGWVFAPIAYLIGVPWHEATVAGSFIGQKIIVNEFVAFMHFGDYLKPDDVVKAAGLQVLSDHTKAIISFALCGFANLSSVAVLLGGLGGMAPNRRGDIARFGLKAVLAGSLSNLMSATIAGFFLAL

SEQ ID NO: 6808 - protein, 255 aa, Xenorhabdus sp.
FIDTHCHFDFPPFLGDETASLERARQVGVEKIIVPTVSQVYFQRVAGLAAKYQAIYAAFGLHPLYINEHHDTDLDCLEQKLKEKLPHCVAVGEIGLDLYMAEPQFERQKSVLAAQLKLARKYELPVLLHSRKSHDQLAAMLRKHHVPRTGVIHGFAGSLSQAQAFVRLGFYIGVGGTITYERAKKTRDTIARLPLSALVLETDAPDMPLAGFQGQPNRPERIAQIFSVLCELRPESPDEISRQIYQNSMALFAIS

SEQ ID NO: 6809 - protein, 385 aa, Xenorhabdus sp.
VGKHIPITLGNIEPLAYTSRIKPGKIALVCEGGGQRGIFTAGVLDEFLRLNFNPFELFLGTSAGAQNLSAYICGQKGYARKVINKYTTNPIFFNPLRFVRGGHLIDLDWYIDMISEQIPLNIPIAMDHFDDGREFYMCTCRADNFEASYFQPDESNWMEIIKASSAIPGFYRNGVTLDGIVYQDGGISDAIPVEEAYRRGADTIVVVRTVPSQLYYTSQWFKRVERWLETSSQQKMLRMLKLHATSYFRTQRFIENPPDDVQIFEIRPPAPLATMALGSKTKALNTDYHLGRRCGRYFLATIGHTFVGGKFGPEKRKSYGVSRSGLNHDGTNRNCFRRNSFLCSEHPPAIGTSARMAEETGVNDSEKLPLTGTTMINVENDFDEQ

SEQ ID NO: 6810 - protein, 44 aa, Xenorhabdus sp.
VKTEKGVVYLSGFVKHEELAKRAIRLAHKVEGVQAVNSTLSIKK

SEQ ID NO: 6811 - protein, 529 aa, Xenorhabdus sp.
MSNSPFLQEVAKRRTFAIISHPDAGKTTITEKVLLFGQAIQKAGTVKGRGSNQHAKSDWMEMEKQRGISITTSVMQFPYGDCLVNLLDTPGHEDFSEDTYRTLTAVDCCLMVIDAAKGVEDRTRKLMEVTRLRDTPILTFMNKLDRDIRDPMELMDEVENELKIACCPITWPIGCGKSFKGVYHLYQDEIYLYQSGQGHTIQEVRVIKGLDNPELDTAVGEELAEQLREELELVKGASHEFDLDAFLQGELTPVFFGTALGNFGVDHMLDGLIKWAPTPMPRQTDAREVTAQEEKFSGFVFKIQANMDPKHRDRVAFLRIVSGKYEKGMKLRQVRIKKDVVISDALTFMAGDRSHVEDAYPGDIIGLHNHGTIQIGDTFTQGEELKFTGIPNFAPELFRRIRLRDPLKQKQLLKGLVQLSEEGAVQVFRPLTNNDLIVGAVGVLQFDVVVARLKSEYNVEALYEPVNVSTARWVECSDVKKLEEFKRKNEQNLAFDGGDNLSYIAPTMVNLNLTSERYPEVVFRKTREH

SEQ ID NO: 6812 - protein, 330 aa, Xenorhabdus sp.
MLVKTSVFGVKVLLIFRRLNYLHFHKIKKIKKLFSHFLDKNGRAEAILFPFTANPWLKVWSVAPKKPISSIEVTHPYNYPFSDNIPVQISQLIKQITHDNPSLTPIFSHLQYAVMLGYFLAAGNDIWGWSKNLLLYVKPTTLRVTANGYAILTSRSNIQKVLHLFYSQWQSLMQEYQNQGKFPVNGPIEIRVTALDEPSDVVQENAVVPSLSAIRPRQDRPEWDVAIWLDVLTHPDTQYAAEFYSRLEAWMFKEFDDTYASIRVEWSKGWGYSTKGAWANEDILTQKIPASFTDGLPADNNWHSAINTLQKFDPHNLFRSPLLEKLISSK

SEQ ID NO: 6813 - protein, 281 aa, Xenorhabdus sp.
MSLYQDNQALSQLTLGKPTSYCDTYEPALLQAVPRSMNREPLGLYPDNLPFYGADIWTMYELSWLNSRGVPQVAIGHVSLNAASENLIESKSFKLYLNSFNQTRFADWETVQQTLQRDLSACANGEIDVVLYPLHDFNQQPIADFEGKCIDNQDIEIDDYQFNRDYLNGAATGPVVDEVLVSHLLKSNCLITNQPDWGSVQIRYKGPKIDQEKLLRYLVSFRHHNEFHEQCVERIFNDLMQLCAPEKLTVYARYTRRGGLDINPWRSNDAFVPPIGRLARQ

SEQ ID NO: 6814 - protein, 455 aa, Xenorhabdus sp.
LITHVSPLGSMDLLSQLEVDTLKRTASSDLYRLFRNCSLAVLNSGSQTDNSKELLSKHKDFDINVLRRERGVKLELVNPPEEAFVDGKIIRSLRANLFAVLRDILFVHAQITDAQKADSLNLKNGMHITNTVFSILRNAKALHLAENPNMIVCWGGHSINEQEYLYARKVGNELGLRELNICTGCGAGAMEAPMKGAAVGHAQQRYKNSRFIGITEPSIIAAEPPNPLVNELIIMPDIEKRLEAFVRIAHGIIIFPGGVGTAEELLYLLGILMHPENENQVLPLVLTGPKESADYFHVLDEFIVNTLGEQARRHYQIIVDDPLEVARVMKTAMPLVKENRRSTGDAYSFNWAIKIPHDLQYPFDPNHENMANLDLHLDQSTEKLAAALRRVFSGIVAGNVKEFGIQAIEKHGVFEIHGDAEIMRRMDSLLEDFVKQNRMKLPGGTAYEPCYKIIR

SEQ ID NO: 6815 - protein, 250 aa, Xenorhabdus sp.
IHLLIVDALNLLRRIHAVQGTPCVAACEHALKQLISHSSPTHAVAVFDEDDRYHSWRHQLLPNYKAGRSAMPEDLQQEMPLIKQAFNALGVASWHAEGHEADDLAATLATKVATTGHRVTIVSTDKGYCQLLSPNIQIRDYFQKRWLDLPFVQQEFGVSPAQLPDYWGLAGISSSKIPGVQGIGPKTAVTLLQQAGSLDNLFRDLETQPDKWRNKLASDKEMAYICREVASLKTDLSLHGNLQQLRLNRL

SEQ ID NO: 6816 - protein, 436 aa, Xenorhabdus sp.
SAPVRALSLTEAYALALHHDPTFQAAIKEQEAGQEEKALGRAELLPKLSISYQNAPKNWQQMESSSTNKRGHQVKERFDRQYDSYSGVLLLTQPLFDIEAWSRYQTRKAYALMSDARFRADSQQLAVRVVNSYVAVAYEQDRLAQIVQRRMAYEKQLEMNQKLFISGEGTRTDIAETQARYSQVQADELTVRDELDAAIRDLQLLVGTPLPADIPVTRLSNVEHFNTINLMFEGYADWEQAALRQNPQLAVARQKIDVAYQEIKRSQAGYLPKLELYASHSENKSGTDNTINQKYRTDSIGVRVSMNLYNGNGTLASERQSAANYDKTKYEMDAQAGEILNALRRHYNGCVNGQKRIRAYEEAVKAAELQVHATEKSVLLGQRVNVDVLNAEQQLYTARRELSQAKYDYMKSWIGLLNESGQLNSEHIQLLSHYFG

SEQ ID NO: 6817 - protein, 445 aa, Xenorhabdus sp.
MSEQTNIKQTQHNESALLPLDASRYLQLGWLVIGIGILGFLIWAAFAPLDKGVASSGMVVVDGNRKTVQSPTNGIIRQILVAEGEHVRAGQILIQLSQVQVNAQIDSLKQQWHTMLATEARLLAEQQGADELIFPESLQAKSSEPRIDNILALQKQLFLSRREMLKSDLAGMKQSEEGVIVQIKGLREAMANKQQQKASLKEQITNLRPLTEEGYFPRNRYLELQRNQIELSGSMAEMVGRIGLLEKQQQETQQRIIQRQADYQREVRSQLADVQVQANELHNKLETAQFDLSHTSIAAPVEGTVVGLKVFTQGGVVASGEKLMEILPEQSALEVEARLMVHLIDKVEIGQNVDLMFTALNQNRTPKVAGKLLVISADRLVDDVTRESYYQIRIRVTPEGMAKLTDLHIKPGMPVEVFVKTGSRSLLSYLFKPLVDRASTSLIEE

SEQ ID NO: 6818 - protein, 589 aa, Xenorhabdus sp.
VKLRHSKGEMTDIIRARSKVFWTIGLFTAFINLLMLVPSIYMLQIYDRVLPSSNTMTLLMLTLITLGMYAIIGGLEYIRSQVVIRIGSQFDMCLNQRVYTASYESNLKNGSTDAGQMLNDLSTIRQFLTGSALFAFFDAPWFPVYLGVIFLFSPYLGLLALVGALILIALAVLNQWLSHSPLAQASHLSLRSANLASTNLRNAEVIEALGMLPALRRRWFGLHERFLNFQRIASERSASITAITKTVRMALQSLILGLGGWLAIEGNITPGMMIAGSILMGRALSPIEQLIQAWKSWNAARLSWQRLDNLLKAQPERKSGMTLPAPNGTLLLEKVFASPPGKIKAAKSTEKNKPVLQDINFSLEAGDILGVIGPSASGKSTLARLLVGVWQAQEGVVRLDGADIYQWNKDELGSHIGYLPQDIELFAGTIAENIARFNDIDAEKVIEAAEKAGVHDLVLNLEQGYDTPIGAGGMGLSGGQKQRIGLARALYGNPSLIVLDEPNSNLDDIGEKALSRAINQLRQQGKTVVVITHRPALLSQTNKVLLLVQGKTKLFGPSQQVMAALAQSASVQTTPVQAKPASNMNLSGS

SEQ ID NO: 6819 - protein, 105 aa, Xenorhabdus sp.
MASSLNLPEPTELTGIWQVTDKHQVCSIELTDVRLPEGSIWALKSDDCLTKMIGNPVTGWRATPDGITLTDAMGYGLAFFSHGSEEWVAYLVDGRELVMTLKSKE

SEQ ID NO: 6820 - protein, 479 aa, Xenorhabdus sp.
MTSKKKYTYTGLSDSNSHSVQDVTSLLSAYVPNSDLNIRVIHKPLGDKAPDELLRTNFHWGNNKVGSSGTLELTYHFLKTAPSIMPRFDISDFQAFNSEQKEAAKLSLQSWSDVANIKFTEVSKLSDANITFGFFDYSASGDYAFATLPRGQNTTYSWYNAQNHTFKTNDIGVNGYGRQTFVHEIGHTLGLEHPADYDASDAVRPTYPNVGQYFEDSRAYTVMSYFSEKFTGQDFQGNYSSAPLLNDITAIQALYGANMETRKGDTVYGFNSNTDRDFMTATDANSELLFSVWDAGGEDTFDFSGFTQNQRINLNEGAFSDVGGLKGNVSIARGVVIENAIGGSGDDIIVGNSADNILKGGAGNDVIYGGLGADHLWGGSGKDTFVYLDGKESLKSNPDWIHDFVSGEDKIDLSQFNFGSKGDLKFVNSFSGKAGEVLLNYNELTDVTDMSISLGGELAGNDFLVKIIGQPSPEMDFIV

SEQ ID NO: 6821 - protein, 354 aa, Xenorhabdus sp.
FEKECAAEITHKAGQKEIYGFARVKENSGYVLFECYQHDDADRLIREIPFREFIFARQMLVVGELLKDLPQEDRITPIIGMLSGVIERAGELRVEVPDTNESKELMKFCRKFTVPLRNAMRQEKLLLAKENPGRPVIHVFFIAPGCCYVGYSYSNNNSRFYMGIPRLKFPSDAPSRSTLKLEEAFHMFIPYDEWEERLDSGLYAVDLGACPGGWTYQLVKRSMIVHAVDNGPMAESLMDTGQVKHHRVDGFKFEPSVKNIYWLVCDMVEKPAKVAQLMTDWLAKSWCREAIFNLKLPMKKRYEEVAHILEKIEIQLKESGVNAQIQAKHLYHDREEITVHVRRIWSAYAMYRDF

SEQ ID NO: 6822 - protein, 78 aa, Xenorhabdus sp.; identical to SEQ ID NO: 4965

SEQ ID NO: 6823 - protein, 545 aa, Xenorhabdus sp.
MKTNYIFVTGGVVSSLGKGIAAASLAAILEARGLNVTIMKLDPYINVDPGTMSPTQHGEVFVTEDGAETDLDLGHYERFIRTKMTRRNNFTTGRVYSEVLRKERRGDYLGATIQVIPHITNEIKDRIIRGAEGYDVVLVEIGGTVGDIESLPFLEAIRQMAVEVGRENTLFMHLTLVPYMAAAGEVKTKPTQHSVKELLSIGIQPDVLICRSDRIIPANERAKIALFCNVPEKAVISLKDVDSIYKIPALLKSQGLDDYICNRFSIERPEADLSEWEQVIYEEANPSGEVTIGMVGKYIELPDAYKSVIEALKHAGLKNRLTVNIKLIDSQDVETRSVEVLKGLDAILVPGGFGGRGIEGKIMTARYARENKIPYLGICLGMQVALIEFARNVAGMEGANSTEFEPECKLPVVGLITEWRDENGNVEVRSEESDLGGTMRVGGQLCRLTENSLVRNLYGQDDIIERHRHRYEVNNLLLKRIEDAGLRIAGRSIDNKLVEIIENPNHPWFVACQFHPEFTSTPRDGHPLFAGFVEAAGKYQKSQLK

SEQ ID NO: 6824 - protein, 433 aa, Xenorhabdus sp.
MSKIVKVLGREIIDSRGNPTVEAEVHLEGGFVGLAAAPSGASTGSREALELRDGDKSRFMGKGVLKAIAAVNGPIAQALAGQDAKDQANIDKIMIELDGTENKSNFGANAILAVSLANAKAAAASKGMPLYEHIAELNGTPGRFSMPLPMMNIINGGEHADNNVDIQEFMIQPVGASTLKEAVRIGSEVFHNLAKVLKAKGMNTAVGDEGGYAPNLESNAAALAAIKEAVEQAGYVLGKDITLAMDCAASEFYNEETGNYELKGEGKTFTSQEFTHYLEGLTKEYPIVSIEDGLNESDWDGFAYQTKVLGDKIQLVGDDLFVTNTKILKEGIEKGIANSILIKFNQIGSLTETLAAIKMAKEAGYTAVISHRSGETEDATIADLAVGTAAGQIKTGSMSRSDRVAKYNQLIRIEEALGNRAPFNGLQEVKGQA

SEQ ID NO: 6825 - protein, 424 aa, Xenorhabdus sp.
LPYSEKANAGLALMAFVGVLWLTEAIHVTITALCIPILAVGMGLMNTGDALKSFANPIIFLFFGGFALATALHIQGLDRLIANRLLLIARGRLSVAVMLIFGITALLSMWISNTATAAMMLPLILGILANLDVRTERNTFVFVLLGVAYSASIGGLGTLVGSPPNAIAAAQLGMDFMTWMKYGVPMVIILLPVMVMLMYIMLRPNLNHKFDLELEHLEWNCKRVIAMFIFLLTVVCWISSSIISDALGGIKDLDTIIAVSAAILIGITGVSTWSQIQNNTEWGVLMLFGGGLTLSAVLKNSGASEVMANGMAATFGSSPWFVIIVAIAAFIIFLTEFTSNTASAALLVPIFATVAEALGMPVIVLTMIIGIGASCAFMLPVATPPNAIVYGSGYIKQTEMVRVGIVLNLACIAIISVVAWFFWI

SEQ ID NO: 6826 - protein, 34 aa, Xenorhabdus sp.
MESLEKSFYQSLNGKTADQIINEAEKIKKNNKAP

SEQ ID NO: 6827 - protein, 642 aa, Xenorhabdus sp.
LYSMKETAMNDNIARKMRQTYNIAYWGGNYYYVNDLGNVSVCPNPDLPEAQVEIVDLVKKVQQEKKQLQLPALFCFPQILQHRLRSINAAFKRARESYGYKGDYFLVYPIKVNQQRRVIESLANSGEPVGLEAGSKAELMAVLAHAGMTRTVIVCNGYKDREYIRLALIGEKLGHKVYLVIEKMSEIAMVLEEAERINVVPRLGVRARLASQGAGKWQSSGGEKSKFGLAAAQVLQLVETLRAAGKLDSLQLLHFHLGSQLANIRDIATGVRESARFYVELHKLGVNIQCFDVGGGLGVDYEGTRSQSECSVNYGLNEYANNVIWGIGDACEENGLPHPTVITESGRALTAHHTVLVSNVIGAECNEFTETTPPAEDAARPLTSLWDTWLEMQDDGYKRSLREWLHDSQFDLYDVHTQYAHGILSLSERAWAEELYLNICRRIQQDLDPSNRAHRPIIDELQERMADKLYVNFSLFQSMPDAWGIDQLFPVLPLEGLDKPLDRRAVLLDITCDSDGIIDHYVEGDGVATTMPMPAYDPENPPLIGFFMVGAYQEILGNMHNLFGDTAAVDVYVTENGEVTYQQSEEGDTIANMLQYVKLEPQVLLTRFRDQVKSTDLAENLQEQFLQEFESGLYGYTYLEDE

SEQ ID NO: 6828 - protein, 81 aa, Xenorhabdus sp.
VNKLAKISTDIIALDGKTMRGTLDKANGSPAIHLVSAWAVANQLCFGQMKVSDKSNEITAIPKLLALLDIAGSTITIDAML

SEQ ID NO: 6829 - protein, 480 aa, Xenorhabdus sp.
KSYRMLIGGEWVDSTSKETMKSYNPATGELLTEYAAGNAQDVELAVRAAKKALPAWRKTSAEKKQSLLLKIADLLEAEAERFITLETLDGGKTQSLCRNFDIPFAIDHFRYFAGVIRAHSDASDVIDENTLSLVIREPIGVIGQIIPWNFPLLMAAWKIAPALAAGNTIVINPASLTPITLLELGRIINQVLPAGVVNIVTGRGSAVGQAILDHEGIDKVAFTGSTEVGYNVAAAAAKRLIPATLELGGKSANIVFPDANIKKAVKCAAHAILLNQGQACESGARLFLHKDIYDSFLQSLKTVFESIRVGDPMDPATEMSCQVSEEQMNTILGYIDLAKQEGATILTGGKRITGAGYDDGFFVQPTILTNVTNNMRVAQEEIFGPVLCVIPFSNEEEVVEMANDSEYGLAGAVWTQDINRALRVAKAIEAGRIWINTYHELPAHTPFGGYKKSGLGRETHKMILDAYTEVKNIYISTKED

SEQ ID NO: 6830 - protein, 160 aa, Xenorhabdus sp.
MRALRQKMIQASEFLQQTFPEPCVTYQQRGTIAGSARLQDWEIRLNPILLIENEQSFIDEVIPHELAHLLVYHQFGKVAPHGKEWRYIMETVFKVPANRTHQFSVQSVCSKIFIYGCHCQQHELSIRQHNKVLKGKSCYVCRQCGERLTLLGKNKPDKTQ

SEQ ID NO: 6831 - protein, 384 aa, Xenorhabdus sp.
MTTHLFTSESVSEGHPDKIADQISDAVLDAILEQDPKARVACETYVKTGMVMVGGEITTSAWVDIEEITRSTVREIGYTSSEMGFDANSCAVISAIGKQSPDINQGVDRADPLEQGAGDQGLMFGYATNETDVLMPAPITYAHRLVERQAHVRKNKTLPWLRPDAKSQVTFQYDNGKIVGIDAIVLSTQHSEEIGQKELQEAVMDEIIKPVLPAEWLTPMTKYFINPTGRFVIGGPMGDCGLTGRKIIVDTYGGMARHGGGAFSGKDPSKVDRSAAYAARYVAKNIVAAGLADRCEIQVSYAIGVAEPTSIMVETFGTEKVPTSTLVQLVREFFDLRPYGLIKMLDLLHPIYRDTAAYGHFGREQFPWEATDKAEILRDAAGLK

SEQ ID NO: 6832 - protein, 248 aa, Xenorhabdus sp.
LSLYLSRRMHDGVVSTLQNIASVAHDVRQRRAFSQRVPSAQIAELHELSQVFNHLLEELEEWQHHLQTEKAALTWQAQHDSLTTLPNRATFERVLSTVMNDKFMRESAAILFIDGNRLKYVNDVYGHAAGDHVLITIANTLKTKVRKTDTVARLGGDEFAILLPSASLEDAERIAKNIIHAMDTPIQLPSGQQLRITLSIGIALSNGALTAEQLLSEADAAMYHIKQRGGGWHSADTTKVNYLSRNSS

SEQ ID NO: 6833 - protein, 144 aa, Xenorhabdus sp.
LLSACQHSGKLTTEQIKVLKQQGFQQTDEGWLFGLSEKVLFGNNQFHLQPAGEEKLKKLAAILSKTGIEHARLDGHTDNYGELSYNNQLSLRRANTVADALTRGGMNRSSLETRGLGPSQPIADNRSSKGRAENRRVAIVITSQ

SEQ ID NO: 6834 - protein, 275 aa, Xenorhabdus sp.
VLLTLAMLIFLYAVVLYKHTKTVIIPDYQFKKAIKNKQFIPYVQPIISSKNNTLIGCEILVRWQHPKQGLIEPKNFISQIERSDLIIPLTHNLITQVRDFFASFAYQLPPNFHFNFNISAKHYKDSGLIEDCRDFLQAFPEDAIHLILEITERELLEPDAHTIELFNKLDKLGVLIALDDFGTGHSNHAYLQKLNVNVVKIGHNFISKMNSDRFSKHIVENIIDLALRLNLEIVAEGVEDQKQVNQLKNYSVNYLQGYYFDRPISPEDFVNKWLK

SEQ ID NO: 6835 - protein, 1149 aa, Xenorhabdus sp.
MSQSIKARHQLYAKVGGEFTAEQTVRFAKVIAAACQDINIKMTTTELPSWVLYLLGDAFHTTYENVSNLNIALRNGWTMALIAKMINEGTEKTGPNALFAIFDRKDIADNHTKNLNRLYKITDLKNFIIEHQNFVRQTLVEKLSANGQVELVNYLNNNNELRDHFADVIVLLSTSTHKSVRKIAEPILNTLPSEIVKQYLSHTLFNGTPKQRIQAADLFARQGDNRNVLEDALKIEKSKSVIKGIESALLRFTVIDEAINQEKLELPSFTPLEDTPLPESAREILVTNFHEMLANALERAEYEIEDNKTSNYSSNWAQRQYKDLRKLSDEKCRALLDKLNGEKGYFNSEEVQVIKHKNRITNLPEFTLFHAVRLATHNSEHDRSFSGYHFTGSIPERIIANLELRHVEDVLAQCHFNNSARTTAEFCLESSVGHRLFPHPEKIWPFYYQNPDFIAEALGLMPNKSQNRYRMFEVSCAIDVLATYPALPTQFIPRIMELALGQNKTHRVSAQQLLERITNIHETVQEGLKSTKQEIRITTIEWLTRIKNPASIPHLYALLKKEKREIVCAALLTALEEFGENISGYLSPEILLEEAQKGLKGKIPASLSWFNFNALPALTWKNKQPVDPAIFHWWVVLAVKLKMPSGNALLQRYIDLLSLESQQKIGSFILHSFVAQDVKGPSLEEAMDEAQREAPSRLNNYKSWVKRYPEHYSKYENFTLEQVIEEIKNEVLRRYCGSAISDKGMLALICNIEGHVAIPVLRNYMRDHYQRRAQIEAILTAISISNDPLIIQLLLSLSRRYRTSSIQETARELVTQIAERNGWSADELADRTIPSAGLNETGTLVLEYGERTFTARLNTKQKLALFNPEGKEIKALPAARNNESEEQIKETKKLFTASKKELKQVIELQAARLYEAMCAQRQWQSSDWLEYILTHPVMHKLIEQLVWQEVRDGEIINQFRPSDDGCLLNLDDDEIVLRNDSSIQLAHSALVSEEDRKAWLAHFKDYKVKFLFSQMENKIPELDLTKNEIEDRKGWVTDTFTLRGILTKMGYQRGPIQDAGSFDHYYKHFSSLNYYVNIEFSGSYVPEENIPAVLFNLSFSKNHLYYWEKNNITLKDVPPILLAESYSDYLKLAEACVGFDPEWEKKTPW

SEQ ID NO: 6836 - protein, 365 aa, Xenorhabdus sp.
MLPEQKIIRESTEIHFADELERLTKADKNNPKPQGWLRSPRAVRQFILGDEELNITAKFFGDDALVDRAIVTLLGKQGLMLVGEPGTAKSMLSELFAAAICGDSGLTIQGTAGTTEDHIKYSWNYALLLAEGPTERALIGSPLYQGMLQGKIVRFEEITRCPPEIQDVLVSLMSEKQLMIPEMGEGARINAKQGFNLIGTANLRDRGVHEMSSALKRRFNFETVKPIQDPAFEISLIHSQLERELGDLAASVTIPTNVIELLVTTFQELRSGNTQDGGNIKTPDAVMSTAEAVNIAYACALEAHYLGNNVLNGGAIARQLIGVVLKDNPDDIKRMRYYMDNIARERAKQDEDWRAFFNASREFWQ

SEQ ID NO: 6837 - protein, 826 aa, Xenorhabdus sp.
IRHHSPACAYGVLSLIESVKPDYILIEGPDSFNSLLPGLLHKDTRPPVAIMAQAEQQITADENGNAEKHHCTAYFPFCEYSPEWQALHIGHSHQAKLLFIDLPWAAQWKDEDNRDIQSRSLQKERYLAHSQFIARLAKKCHCRDHDDVWEHLFELRSIESLTDWQQLFYDTFIWCAFARLDYEPQVLEAEGSLQREAHMLMHILAVKQHKPNAKILIVTGGFHTLALVEELAKFSETQFIPSDAQQKQFDKMLKFREKDSSWLIRYSFDRLDALNGYASGIPSPAFYQRSWQSLLKQRQDREASHQSSDQPTQIYRNKTGVAFLTDVAEAIRKKTFDNPPSYLTVKHAAEQSLRLAALRGHAGPGRYDLLDGLQSSFIKGSLDDSQNELWSEIKRCFSGYLLGSIPTGTTTPPLVAESYEKAKAFRFKLDDTLIKITKLDIYRNPQHRLRSRFLHLLAFLEIHFAHRTNGPDFLSGHQLDLLFEEWQYAWTPAVEGELIALSEKGSQLEAIALSKLLMLEKRLEEQGQSRSSQSVTSLLTQAVMIGLHQRIPILLQLLDSYIQQDFRLDSLITCGHQLIHLWRGRTFFDITDQSILENRLYQVIPQAFFCLDQIAQGDEQQQETHLQALLSLRELIEFMPMISQIQNSTHSYQSDFYQQLNRLDGKLDEVPLLKGAIDALRYLGDQVDENLLTDNLEKIFSTGSDPEKAIGYFVGIMRTAPELVIKTPILIDHLNQLLSQWDDQRFIQILPDLRFAFSQLTPKQNEELSRYIAGEIGLSRQELSLWQTEFSEKEMLEATGLNQKLHTRLSEQQLLGWFNTDKGKYK

SEQ ID NO: 6838 - protein, 383 aa, Xenorhabdus sp.
MSQHDDMPDDKKQQAKRWRLVFGQYADNALGQASFNTEDFKIERTLDFLYRREYQRRGLRQERGRHGSLDASQLAAVNWLNQARKLFPNSTFERMQSQAIERYEINSFLNEPQALKAMEPTKALAKALMSLRGKMNEETREAVRQIIRQVVEDILRQIRNNFRQSLTGRRNRFRRSLIPNSRNFDWRATIAANLKNYDTSNKRLLIETPYFNSRMQQHMPWDVILCVDQSGSMANSIMYAAICASILASLPTINVSLVVFDTQVVDLSHLAHDPVEVLMTVQLGGGTDIAGAMQYCETLVKNPKRTIVSLISDFEEGGSLARLLNCTQRLHSQQIKLLGLAALDDEAMPAYDSTIAQKLADRGMHVAALTPEHFAQWLAEVMQ

SEQ ID NO: 6839 - protein, 686 aa, Xenorhabdus sp.
MSWQTIYLHYDEDALAVFANMGLLRRARKDVDNGKVALIDPQGGIFNSDGQQVILDAQGVQKAQCDCPASDCCKHILATVLWLQANSTEQASEEEPINETMPQSSESLISELLSLSPEELIKLTGKVNCRLAIRLLQQWEQDQKQIRTEDINSQLKIYLPEFEEPIIFLKKSGYKGMLSSLPENQRKALHLAAIVKLFKQYQQSWVWPDELNVIPSEKQPLSKDEKNLIAIISQFMEELLRQGLSHISRSSATQLHLLNMSAKAEGLPLLASYLRGLSGQVKLLADKHFTMDEGRVLHFLAQLSAYLYQLTHAAPDQLMKLRGILRKQYDEKNTTLSLIPISADWWTTNSGALGATFTFWNDEEKQLLQSTQARANRHDPHFNCHGVWSTLSVWKQTADKLMRRPFILHFPRISDEGKLATSGDSYATSQNTPFNLKQYQSLQTHFGIQDWNELPDYFSRQPDDFFSPLLLHIENYQPLFWYEIEQCIIWEVNDSKGNSAFLRLYWEDAIHNHIEELRYITKKELEIIGVSVQPTRREQRIDLIPTTLWLKKGDDITWFYLDFDFHPRKKQRSTFISHIQEYMAKKKRQNAAHYSEPTLSQKLCRPILSVLEAQACTGRQSLSISQKEQLDLSRQTAEDLGMDLLANCLRDYLILNKQDATESLLRLTWLCNQLQQLQSQLPIQLR

SEQ ID NO: 6840 - protein, 233 aa, Xenorhabdus sp.
DFGQAISVWLAREGAHVDLCARQLKNAEATCEIIQSEGGVARSYQCDTSDAQSVRDFADQLLQDSKPIDILILSAAQWLEGDLSENNSDEDIISTINSGATGSMLLTKMLLPSLRQSQGADIIAMVSVCGIPNFTRSVAHPAFFAAKHAMSGFCNTISHQLSKDNVRVTGIYPPDFELNGFDEILDDHTTMGKQMLNGRSVWESIRFVLTQPRSCHVSAIYFQGPTFEDMKQL

SEQ ID NO: 6841 - protein, 77 aa, Xenorhabdus sp.
MSIKSILQELGVEASVGHTDLGSAKGIKSDIFVATKDIAEQLAEQQVNGKIVVLENMLDKSAMKLRLSAALQDLGRL

SEQ ID NO: 6842 - protein, 147 aa, Xenorhabdus sp.
MLRTLLTRDVIQWFPDVRDWHEAIEIACQPLINNGAIQPSYVEAIYESHEKFGPYYVVGSGIAIPHARPEQGVNRLALSLTLIKQGVRFGSAENDPVKLLFVFATTSNYSHIEVIAELAGLFDDQEKINRLMQAKNQDEAFSIIQGY

SEQ ID NO: 6843 - protein, 664 aa, Xenorhabdus sp.
MSQDNTGQVETKTYINPPVFFFSAFLIIALVAFAGLKPELADRWFKSLQQDLFVNASWFYILAVALILLSVTYLGLSRYGNIKLGPDHAEPDFSYFSWFAMLFSAGMGIGLMFFGVAEPVMHYLSPPVGTPESIAAAKQAMQLTFFHWGLHAWAIYAIVALILAFFSYRHGLPLTLRSALYPIIGDKIYGPIGHTVDIFAVIGTVFGVATSLGYGVLQVNAGLNHLFGLPINETIQVILIIAITALATISVVSGLDKGIRILSEVNLGLAVLLLVLVVALGPTVLLLKSFVENTGGYFSEIVSKTFNLYAYEPKSSNWLGGWTLLYWGWWLSWSPFVGMFIARVSRGRTIREFVTGVLFVPSGFTLMWMTAFGNSAIDLIANKGAKELANVVQTDVSLALFNFLEYFPLPTVLSFIAMVMVVMFFVTSADSGAMVVDTLASGGAHHTPVWQRIFWAGLMGVVAISLLVAGGLSALQTVTIASALPFSIVLLISIYGLLKALRIDAYKKDSQQMTTIAPTASRNPIPWQRRLRNIVYYPKRSQVKRFMSEVIQQSMSMVAGELEKQNKTVLINDEAEDRIHLEVDFGENISFVYEVRLRGYIQPAFALAGLEDEEKIEEQKYYRAEVYLKEGGQDYDLMGWTQEQIIHDILDQYEKHIHFLHLVR

SEQ ID NO: 6844 - protein, 416 aa, Xenorhabdus sp.
MDFFRFLMNDVLAEPAVLVGLISLIGLVLQKKPVTECIKGTVKTLLGFVILGAGAGVIVSSLSGFAVIFQHTFGIQGVVPNNEAIVSIAQKSFGKEMAMIMFFAMVINILIARFTPWKFIFLTGHHTLFMSMMVAVILSVAGIHGVALVATGSIVVGVSMVFFPAIAHPYMKKVTGSDDVAIGHFSTLSYVLAGFIGSKLGNRDHSTEEMNVPKSLLFLRDTSVSISLTMAIIFLLTCLFADQEFVRQISGGKNSIMYSLMQSITFAAGVYIILQGVRMVIAEIVPAFKGISDKLVPNSKPALDCPVVFPYAPNAVLIGFLSSFIAGVIGMFLLYWLNMTVIIPGVVPHFFVGATAGVFGNATGGRRGAILGAFAQGLLITFLPVFLLPVLGDIGIANTTFSDADFSAVGILLGLI

SEQ ID NO: 6845 - protein, 169 aa, Xenorhabdus sp.
MDGYIATENHELGWLETFALSDDATPYETFYQGIGAAIIGAGTYEWIMKNTAGHWPYQNIPSFILSSRNLPVPAEINAVITHDSASEIAAKARAAAKDKDVWIIGGGETAAFFADAGELQQLFLTTVPVFLGSGIRVLPVNHLIEAVPNKQRLLSSGAIETIMDIKPTA

SEQ ID NO: 6846 - protein, 47 aa, Xenorhabdus sp.
VRFIFQIAEENMRIPGADKMVELGCMDGVSEVYALHNDGAEDTGTIL

SEQ ID NO: 6847 - protein, 352 aa, Xenorhabdus sp.
KKNLWKTNEKRWQAIVERDKDADSHFVYAVRTTGIYCLPSSTARLPKRENVIFFDNESDAKQQGYRPSKRLPGNQPEQEAGNLAKIAQACRYIEQNEGHLTLENIANHIGMSPFYFHRLFKAKIGLTPKAYADAYRGQRLRSNLEQKHSVTEAILDAGFNSSSRFYEISSDLLGMTPKTWRAGGKGVQIYFALGICSLGHILVAQSKKGICAILLGNDPNKLLQEVQDKFPQAEFIGSDPQFEQIIAQVVGFIETPKAELKLPLDIRGTAFQQRVWLALREIPIGTTISYAEIAKRIGSPKAIRAVANACAANMLAVAIPCHRVVRNDGSLSGYRWGIERKRELLMREAKKQ

SEQ ID NO: 6848 - protein, 96 aa, Xenorhabdus sp.
MVRIIILKHFHNLSDEKMEYQLLDRMSWQRFCRLTDVINIPDRNTIWCFEKRIGQEGARALFEEAKHQLSAQGFIPRGGQIIDATLIPVPKQHNKL

SEQ ID NO: 6849 - protein, 356 aa, Xenorhabdus sp.
IDDPRSDINKKHELMDVIFLAFSAVLCGASGWKSIQEFGELQIEWLKQYTSFTHGIPRRHCVANIIKMIDQDALVEAFYGWINQRRVTAGKSLIAIDGKTLRGTCKGTLFEALHVVSAYDVESGIALYHRAAESKGKEGPVARQLIELLALDEAIVTMDALHCQKETLELIKQRGGDFIVGLKGNQKTLYEFVKSRFSAHYDHDELVEFTEKNSGHGRKECHHVMQIQAALPEELQQQWPSIQSVIEVVSERSTKGQPAHRDSRWYVSSLPLDAETAAKAIRRHWAVENELHWVLDVAFREDNISLKDPDGAAQMALFNRIALNVIKQNTSIKDSQAAKRRRATWSGEFRSQLIFD

SEQ ID NO: 6850 - protein, 167 aa, Xenorhabdus sp.
FNYPLPNLVSELRDILYSKLVAIANDWNQKLNINIKYPNTLKNYLDICHSVGQYRPTPLLLKYKQGDYNCLHQDLYGDLKFPFQIAFLLSEYEKDFCGGEFIMTEQRPHKQTRPIVLNLQKGEAVIFTVQHRPVQGTKRIYRVNMKHGVSTIHHGRRHTLGIIFHDA

SEQ ID NO: 6851 - protein, 63 aa, Xenorhabdus sp.
MEQVTGAGGKEIAEGVFGMGEKIGEGIIDALEKFGVISKETGEHIKGAMKKGVEFVDSIIDAI

SEQ ID NO: 6852 - protein, 92 aa, Xenorhabdus sp.
MGRKKAFILGNIFMGLGMAGMLISLAYVLLSHIFSIKESEFFAGVALVGLFVGALIWLGGASLGGREHITDKYWWLKNYDERYRRKKQHKHS

SEQ ID NO: 6853 - protein, 533 aa, Xenorhabdus sp.
ILLLLSTIFALISGFSGASVVGMISQGITGTVNLTSFIWNFFGLCILFFVTKTLSEIMLSHLTQATIYSLRLSLSNKILRAPFKKLNRFGKHGLLAVLTKDVDVFIHSFMLAPTVFGNITLIIACFGYLAWISWQLFIILAIVCLVTASLFYFLEKRPIRLMEEMREQVDKIYLNFQQLIDGSKELKLNRQKGNAFIDKVISPAALKFKEICIKANNNYAWVLNAGSVIFYIVIGLMIFVIPIWLPQEPATLMTVTLIVLFLSGPISEVIGAIPELRQAEVSLQKMKRLDSELEESLYIQQANTPDPFLTEKPLSLELKDIIHHYTTDKEDREFKLGPMSMTISQGEIVFIIGGNGSGKTTLAMLLVGLFEQESGSIILNGTKMDETNNEHYRQYFSAVFSNYHLFDQLLNTGTNVTEKATHYIEALNMGHKVKVIDGQFSTTDLSAGQRKRLALVAAYLEDRPIYLFDEWAADQDPVFKRIFYTELLPELKSRGKTVIVISHDDAYFDIAERVIKLEDGHIKEIKTSSHHPS

SEQ ID NO: 6854 - protein, 577 aa, Xenorhabdus sp.
VMTFAEVSKHFTGIALEVWPGSEFVPIKKQNKLRIISLLTNIQGIKSTLSKIFFLSLVIEAINILLPVGTQLIMDHVIIAQDHSLLKIICCGLLFFILFRVSVSTLRSWTSITMEAFVDVQWKSGVFDHLMKLPLAYFEKRKLGDIQSRFGSLSVIRTTFTQNVINSIIDTIMLVSVFIMMLLYGNWLVWVVLGFTIIYIIIRFITYQYFRQLSEEQIVKDARANSHFMETLYSINTLKALGLCDSRAKSWLNLNIDTLNSNTRLNKIGSIFNIIKTFISTSEQIIILWLGASLVIDNHMTLGMFVAFNSYRGQFADRASNLIDMAMKLRMLNLHNERIADIVLTDTEKETPDRELGFSGKAVNLTIHDLHYQYDNLSKPIISGFNLHINAGESIAIVGPSGAGKTTLMKLMSGLLEPNKGTILMNGLDINIIGLNNYRKCIACVLQDDKLLSGSIAENISGFTHSPDVHFIQECAKRANIHDDILLMPMGYETLIGELGNGLSGGQIQRLLIARALYRRPSILFMDEATSHLDLDNESYINESVSSLKITRIIIAHRPSTIQSAERVISISGSGAP

SEQ ID NO: 6855 - protein, 413 aa, Xenorhabdus sp.
RWTGKAILIAKVPAWVICVASIVFLTILFIFITFGNYARRINVYGEVITNPHPINISASQQGFILKSFVKVGDIVKKGQKIYQVDISQVTESGKTSTNAQNSLKNQLTQINKIIENLEHNKSVTLASLEEQKNQYELSHEKNRIIVENARQGVEFAKENMKNYKVYQERGLITKDRFNSYGYSYYQQQNMYQNLYSQYISDSLKITSLNSDIMLQKADFDKQISQYKIQKDDLEQKLTEMNVSGSIFITSPIDGRIESLNFTDGQMVVTNDNLVQVSPDDVKPTYYLILWVPNSSLPYIKKGDGINIRYDAFPFEKFGQFSGDINNISYIPATAQEMSHYRSSPVNVPGDKTESYYKVLVNLKKEQFNYNGRKLYLSNGMKAQSTFFLENRPLYQWMFSPFYDMKKTLSGPQK

SEQ ID NO: 6856 - protein, 363 aa, Xenorhabdus sp.
MGFKCGIVGLPNVGKSTLFNALTKAGIEAANFPFCTIEPNTGVVPMPDPRLDKLAEIVKPQRILPTTMEFVDIAGLVKGASKGEGLGNQFLTNIRETEAIGHVVRCFDNDNIIHVSGQVDPAADIDVINTELALSDLETCERAIQRVQKKAKGGDKDAKTELAALEKCLPHLEQAGMLRALDLSAEEKAAIRYLSFLTLKPTMYIANVNEDGFENNPHLDTVRAIAAKEGSVVVPVCAAIEADIAELEDEDREEFMAEMGLEEPGLNRVIRAGYELLNLQTYFTAGVKEVRAWTIPVGATAPQAAGKIHTDFEKGFIRAQTISFEDFITYKGEQGAKEAGKMRAEGKEYIVKDGDVMNFLFNV

SEQ ID NO: 6857 - protein, 193 aa, Xenorhabdus sp.
IKLIVGLANPGAEYAQTRHNAGAWFVDLLAQRHNQSLKEESKFFGYTARINMNGQDVRLLVPTTFMNLSGKAVLALAGFYRIQPDEILVAHDELDLPPGVAKMKLGGSNGGHNGLKDIQNKFGNNPNFHRLRIGIGHPGDKNKVVGFVLGKPPVGEQKLIDDAIAEALSCTDIIMKDGMSKAINRLHAFKASA

SEQ ID NO: 6858 - protein, 232 aa, Xenorhabdus sp.
LILGEFNFPTRDEQTFAPIYTYEGLGHTVIAYGLWNLYNNAWLSGDLHYSHINYDSLIRNIELGEATRREIGSTLGKQWGVRITANWNIPVNEVITTSPIVQFIWDKGDVNGYREHENNSTSMHFSGQRYTSEIGTLGWRVDTQLGRFNPYAAVQFNRQFGDLSTKIRSAINATKTSFVVESSKRSKNWRQYTLGMNMGLVNNLHSFITVTRNEGSGEEPDYNFSLGINAIF

SEQ ID NO: 6859 - protein, 162 aa, Xenorhabdus sp.
MSTSTGVLAHNWAFAIFLIGALGLTAFMLLGAYFLGGRAKARAKHVPYESGIDSVGSARLRLSAKFYLVAMFFVIFDVEALYLYAWSVSIKESGWLGFAEASIFILVLLAGLVYLARIGALNWTPARSRRQVSHPSADVHTADVSTTNANTTNVNTNNSQMQ

SEQ ID NO: 6860 - protein, 224 aa, Xenorhabdus sp.
MDYTLTRIDPNGENDRYPLQKQELVSDPLEQHVHRSVYMGKLEHALHDMVNWGRKNSLWPYNFGLSCCYVEMVTSFTAVHDVARFGAEVLRASPRQADFMVISGTCFVKMAPVIQRLYDQMLEPKWVISMGACANSGGMYDIYSVVQGVDKFIPVDVYIPGCPPRPEAYMQALLLLQESIGKERRPLSWVVGDQGVYRANMQSERERKRGERIAVKNLRTPDEI

SEQ ID NO: 6861 - protein, 599 aa, Xenorhabdus sp.
MMTDQIAQESVRPAWETRDHIDDPVVSELNRQFGPDAFTVQPTRTGMPVVWIKRERLTEVITFLRKLPKPYVMLFDLHGVDERQRSHREGLPAADFSVFYHLLSIERNRDIMLKVALDERDLNIPTITSIFPNANWYERETWEMFGITFNGHPNLRRILMPPTWEGHPLRKEYSARATEFDPFMLTKQKEDLEMEALTFKPEEWGMKRGTENEDFMFLNLGPNHPSAHGAFRIILQLDGEEIVDCVPDIGYHHRGAEKMGERQSWHSYIPYTDRIEYLGGCVNEMPYVLAVEKLAGIEVSERVKAIRVMLSELFRINSHLLYISTFIQDVGAMTPVFFAFTDRQKVYDVVEAITGFRMHPAWFRIGGVAHDLPRGWDKLLRDLLNWLPKRLNSYVKAALKNSVLKGRSVGVAAYNAKQALDWGVTGAGLRATGIEFDVRKWRPYSGYENFDFEVPVGYNGDCYDRVMLKVEEIRQSMRILEQCLKHMPEGPFKADHPLTTPPPRERTLQHIETMINHFLQVSWGPVMPANESFQMIEATKGINSYYLTSDGSTMSYRTRIRTPSFAHLQQIPSVIRGSLVSDLIVYLGSIDFVMSDVDR

SEQ ID NO: 6862 - protein, 181 aa, Xenorhabdus sp.
MQSEFNANKQARLDVVNVTDTQIPDEFVLSAGERDAIEQEKHHYEDPRAASIEALKIVQKQRGWVPDGAISAIAEVLGIPASDVEGVATFYSQIYRQPVGRHIIRYCDSVVCHITGFQGVQAAIEKHLSIRPGQTTTDGRFTLLPTCCLGNCDKGPTMMIDDDTHSYVKPEEIEKLLEQYQ

SEQ ID NO: 6863 - protein, 448 aa, Xenorhabdus sp.
VKEIIRTAEAHPLTWRLRDDQQPVWLDEYRSKNGYKGAERALKGMAPDEITTLVKDAGLKGRGGAGFSTGLKWSLMPKDESMNIRYLLCNADEMEPGTYKDRLLMEQLPHLLVEGMLISAFALKAYRGYIFLRGEYVEAAVHLRKAIEEAKAAGLLGKNILGSGFDFELFVHTGAGRYICGEETALINSLEGRRANPRSKPPFPATAGVWGKPTCVNNVETLCNVPAILEHGKEWYIGLSEGKSKDAGTKLMGFSGRVKNPGLWELPFGTTAREILEDYAGGMRDGLKFKAWQPGGAGTDFLTEEHLDLPMDFEHIAKAGSRLGTALAMAVDHEINMVSLTRNLEEFFARESCGWCTPCRDGLPWSVKILRAIEEGKGQPGDIETLEQLCRFLGPGKTFCAHAPGAVEPLQSAIKYFREEFEAGIVTRDYGNTSLIAGIQPNLLKQRW

SEQ ID NO: 6864 - protein, 402 aa, Xenorhabdus sp.
  unsure (1)..(402): unsure at all Xaa locations
GSMLTMATIHVDGKNYDVNGADNLLQACLSLGLDIPYFCWHPALGSVGACRQCAVKQYQNAEDTRGRLVMSCMTPASDGTYISINDEEAKQFRASVVEWLMTNHPHDCPVCEEGGNCHLQDMTVMTGHSFRKYRFTKRTHKNQELGPFIAHEMNRCIACYRCVRYYKDYADGTDLGVYGAHDNIYFGRPEDGTLESEFSGNLVEVCPTGVFTDKTHSERYNRKWDMQFAPSICQQCSIGCNTNPGKRYGKLRPIENRYNGTVNHYFMCDRGRFGYGYVNRGDRPRQPQQLRGDQWXSLNPLQVMQGGADILRQAKNAIGIGSPRASIESNFALRELVGAENFYSGISAEEQHRLDMMLEILQQGGVYTPSLREIEDYDAVLVLGEDFDTDRCPHGAVGTSGS

SEQ ID NO: 6865 - protein, 519 aa, Xenorhabdus sp.
MALSVRQAVKGKAREMAAAQKVADWQIAAVMNIGQHAKYPLFLTSVDDTRLDDIAAWNYRAPVDDQARFGFAVAHALNSIAPAVDDLPDELKAKVEIVAQALRGAKKPLIISGSNAGSDTLIQAAANIAWALKDSGANVGLSYVAAYANSLGLAMMEAQSLDVALQRIAKGDSDTAIVMENDLYRHAPADKIDSALGSLKNLIVVDHQHTAIMDKAHLILSASSFAESDGTLVNQEGRAQRYFQVYEPAFYDKSVVMLESWRWMHSLHTTYTQRQTDWTQLDHVIEACVKEMPQFKGIVNAAPDATFRIRGQKLARSPHRYSGRTAMLANVSVHEQRQPQDIDTAFAFSMEGNNSPFADRQQIPFAWAPGWNSPQAWNKFQAEVGGKLRFGDPGVRLIETVDGGLNYFDSIPAAFSAQKNEWYIAPYFHLFGSEELSQRADVIQERMPEPYVMMNRQDAEHLNVKEGSMMEFDCSGQQLRLAVRLSSNLAQGQIGLPLGMPGIPPVLAGRAVNNLREVA

SEQ ID NO: 6866 - protein, 294 aa, Xenorhabdus sp.
MSFGERRLLGLFQNRYGPNRVGWGGSLQLVADMIKMFFKEDWAPRFSDRMIFTLAPIVGFCSLLLAFAIVPVSPTWMAADLNIGILFFMMMAGLAVYAVLFAGWSSNNKYSLLGAMRASAQTLSYEVFIGLSMMGVVAQAGSFNMVEIVNSQQHLWNIIPQFFGFLTFAIAAVAVCHRHPFDQPEAEQELADGYHIEYSGMKFGMFFVGEYIGIVTVSALIVTLFFGGWHGPFLPPFVWFALKTAFFMMMFILIRAALPRPRYDQVMSFGWKICLPLTLLNLLATAAVILYNAQ

SEQ ID NO: 6867 - protein, 50 aa, Xenorhabdus sp.
VYEKEDLLISGPGKYPDYNFYRKSGMAIDGKDKGEADNEAKPIDVKSLLP

SEQ ID NO: 6868 - protein, 175 aa, Xenorhabdus sp.
MEFAFYIAGLIAILATLRVITHTNPVHALLYLIISLLALSVVFFSLGAYFAGALEIIVYAGAIMVLFVFVVMMLNLGKSVADQERQWLKPRAWIGPVILSSILLVILIFAIHSLPEAAISGEVVSAKEVGISLFGPYVLAVELASLLLLAGLVVAYHVGRESRQGEVLSNRVEDQ

SEQ ID NO: 6869 - protein, 97 aa, Xenorhabdus sp.
MEHGLILAAILFALGFTCLIIRRNLLFMLIGLEIMINASALAFIVAGSYWLQPDGQVMYILAITLAAAEASIGLALLLQLYRRRQNLNIDIVSEMRG

SEQ ID NO: 6870 - protein, 597 aa, Xenorhabdus sp.
AFSRGRWSENLSATVGISSVGLAALVTLWVGMDFHTQNEAGGFVYSQTLWNWMSVDSFSIPVNLVLDGLSLTMLSVVTGVGFLIHTYASWYMRGEEGYSRFFAYTNLFIASMVVLVLADNMLLMYLGWEGVGLCSYLLIGFYYKTPANGAAAMKAFIVTRVGDVFLAIGMFILYDQLGTLSFRELAVLAPQHIEAGSTAITWATLMILGGAVGKSAQLPLQTWLADAMAGPTPVSALIHAATMVTAGVYLIARSHALFLMAPDILHLVGIIGAVTLLLAGFAALVQTDIKRVLAYSTMSQIGYMFLALGVQAWDAAIFHLMTHAFFKALLFLASGSVILACHHEQNIFKMGGLSKRIPFVYLCFLVGGSALSALPLLTAGFYSKDEILWGALANGHMNLMLAGLIGALMTSLYTFRMIFIVFHGKENTKAHSVKGITHTLPLSVLLVLSTFVGALIEQPLTGILPGNGAQGHDGKMTLEIVSGVVAVLGILLAAALYLGKRSLVNAIANSAPGRFFSTWWFHAWGFDALYDWVFVKPFKGITQLLRNDPLNSLMNIPAILSRWGNKGLGLSENGQVRWYATSIGLGAVLVLALLLLV

SEQ ID NO: 6871 - protein, 506 aa, Xenorhabdus sp.
MLLPWLILLPFIGGLLCWQAERFGTCVPRWIASLAMGLTLLLSLYLWMQGGYTLTNPQGIPQWQSEFMMPWIPRFGISIHLALDGLSLLMVVLTALLGLMAILCSWNENQPYQGFFHLNLLWILGGVMGVFLAIDLFLFFFFWEVMLVPMYFLIALWGHRGSQGKTRITAATKFFIYTQASGLVMLISILALAFIYHDATGEWSFSYEKLLDTPMSHTVQYLLMLGFFIAFAVKMPVVPLHGWLPDAHSQAPTAGSVDLAGILLKTAAYGLLRFGLPLFPQASAEFAPIAMWLGVIGIFYGAWMAFSQTDIKRLIAYTSVSHMGFVLIAIYTGSQLAYQGAVIQMIAHGLSAAGLFILCGQLYERLHTRDLRQMGGLWGRIQLLPAISLFFAVATLGMPGTGNFVGEIMILFGSFGKFTLIATVSVFGLVFASVYALYLMQKAHYGTPKSDDPLPRMDAREISILLLLGALLVILGFYPQPILDTSAAAMSNIQNWYSASLLTTRP

SEQ ID NO: 6872 - protein, 485 aa, Xenorhabdus sp.
MTITSEQLIALLPLLIVGLTVVVVMLSIAWRRDHFTNVTLTVIGLNLALLSLYFVGQQEPMDVTPLLHVDRFAMFYTALVLIASLATTTFAYSWLENYPDNKEEFYLLVLIAAAGGILLSAANHMASLFIGIELITLPLFGLIGYAFRQKRSLEASIKYMLLSAAASSFLLFGIALLYAESGDLSFASLGRSLSDSKLHEPLVLAGLGMMIVGLGFKLSLVPFQLWTPDVYQGAPAPVSTFLATASKVAIFAVVMRLFVQAPVTDSETLRIVLTVIAIASILFGNLLALTQSNIKRLLGYSSIAHLGYLLVVLIAIKDHKLAEETAGVYLAGYLLASIGAFGVVSLMSSPYRGPDAESLFSYRGLFWHRPILSAVMTIMMLSLAGIPLTFGFIGKFYVIATGVEARLWWLTGAVVLGSAIGLYFYLRVMVSLYLPAPKALNRDTPRNWARTSGGIVVLLTALLVLLLGVWPQPLIEIVQQAKSVM

SEQ ID NO: 6873 - protein, 63 aa, Xenorhabdus sp.
MVSINQARNYDMPFEIDNSIGRLRYFAFRPDSDNVISFNKNAASFDFTLIFIHSYNHVSVFQQ

SEQ ID NO: 6874 - protein, 500 aa, Xenorhabdus sp.
MKDKEPDQLRRLLVKAPLLIPLLTTLPASAKEKLMSSFIGDKSPDAIPTAGKTLLLKNADVVVTMDKDKREIKRSCVFIKGNNIIAVGTESEVPQTADRIIDLKGHIVIPGLINTHHHMYQSLTRVVPSAQDGELFTWLTALYPIWEKLTPEMMKVATKTAMAELMLSGCTTSSDHQYIYSNGIKLDHSIEAAQEMGMRFHACRGSMSMGKKQGGLPPDSLVENEKFILKDTQRVIEQFHDAKRGAMIRIVVAPCAPFSVSEVLMRESAKLARAHCVSLHTHLAENISDIDYSKKNFNKTPAQYVEDLEWVGHDVWHAHCVKLDDYGIKLFARTGTGVAHCPCSNMRLGSGIAPVRHMLDAGMHVGLGVDGSASNDSSDMMAEVRQALLLQRVGFGPEALTARETLEIATLGGAKNLNRDDIGALAPGMMADIAVFSLKGIGLAGAQHDPVSALVFCNPGKVAYNIINGRIVVEDGKVTTVDVPVIIEQHNRLAYQLVEG

SEQ ID NO: 6875 - protein, 123 aa, Xenorhabdus sp.
VEIIEGHLMPDHVHMLVSIPPKLSVSSFMGYLKGKSSLMIFDRHANLKYKFGNRKFWAEGFYVSTVGLNEATIQKYIREQEKSDLISDKLSSKEHVDPFKGWAKAAKTLSLNEEKAASFRRSR

SEQ ID NO: 6876 - protein, 274 aa, Xenorhabdus sp.
MTSIQAGASLAKTVFHVIGAPGVTALRLALGTLILFLIFKPWRLKFTRSSLTPLLAYGISLGGMNYLFYMALSKIPLGIAVALEFTGPLAVAMFSSRRPVDFLWIVLDIAGLGFLLPIGDDVSTLDPVGILYALGAGVFWALYIIFGQRAGAGYGAATVSIGSLIAAVIFFPVGLIQTGPELLFDASLLPIALGIAILSTALPYTLEMIALTRLPAKTFGTLMSLEPALGALSGIIFLNEHLTTTQWLALLCIICASIGSTTTMKQKTKIEKIQ

SEQ ID NO: 6877 - protein, 168 aa, Xenorhabdus sp.
MSTAKFVRKSSSKLIYTRNNISEGVKQSSIYALNHMVIQFTDLSLMTKQAHWNIRGRNFIAIHKMLDDFRTALVDHLDTFAERVVQLGGVALGTLQEVHKGTQLESYPTGIHDVQDHLKALADRYAIVANDIRQAIGDAEDEDTADMFTAASRDLDKFLWFLEANIEH

SEQ ID NO: 6878 - protein, 73 aa, Xenorhabdus sp.
MDIEVKDSNGALLNDGDSVQVIKDLKVKGTSKTLKRGTLIKNIRLTHREDEIECNVDKIKGLVLKTCFLKKIG

SEQ ID NO: 6879 - protein, 280 aa, Xenorhabdus sp.
MNSQYFVIPQWLSEHLNDENVVVIDASAPMPTESIDYQQKWLEKHIPGSGFFDLDKIADLQSPLPHMLPAPETFQKAVSEMGISENHLIVIYDQGNMFSAPRAWWTFKTFGAKNIRILEGGLQGWQRAGYPTESGEVSHHAQVFNIHFSPEHVISRQQILDILHNEEEKTQVVDARSVERFQARAPEPRPGLRMGHVPGSKNVPWTALLENGHYKSPDEIKRIFKQQGVDLGQPIITSCGSGMTAAVLVLGLDIIGHKKAALYDGSWAEWGADDNLPSEK

SEQ ID NO: 6880 - protein, 372 aa, Xenorhabdus sp.
MSTHSITKQQEPAYHIAVLPGDGIGPEVMKQAYKVLDAIRRRFSIRITTSEYDVGGIAIDRHGCPLPEATVAGCEKADAILFGSVGGPKWEHLPPASQPERGALLPLRKHFKLFSNLRPAHLYTSLTSFCPLRHDIAEKGFDILCVRELTGGIYFGQPKGREGEGRYERAFDTEVYHRFEIERIARIAFESARKRRHKVTSIDKANVLQSSVLWREIVSEIAKEYPDVEINHMYIDNATMQLIKAPSQFDVLLCSNIFGDILSDECAMITGSMGMLPSASLNEKGFGLYEPAGGSAPDIAGKNIANPIAQILSTALLLRYSIKRDDIADAIETAVNAALEQGYRTADLAGNGEAISTDEMGDIIAQNIIGKN

SEQ ID NO: 6881 - protein, 500 aa, Xenorhabdus sp.
KKNCKLLMHWKGLGVDIIEAGFPVSSPGDFESVQTIAREIKNSRICALSRCVDNDIDVSAEALSVAEAFRLHMVLATSNLHVEHKLKKGFDDIVEMAVRSIKRARRYTDDVEFSCEDAGRSDIDNLCRIVEQAIKAGATTINIPDTVGYTTPYQFGGIIKTLFNRVPNIDKAIISVHCHDDLGMSVANSITAVQAGARQVEGTINGLGERAGNCSLEEVIMAIKTRQQMLGVHTNINHKEIYRTSQLVSQICNTPIPAHKAVVGSNAFAHSSGIHQDGVLKNRETYEIMTPDSIGLKDTQLNLTSRSGRSAVKHRMTEMGYQEKDYDLDALYEAFLKLADKKGQVFDYDLEALVFINQQQQEDEHYRLDYFSIQSGTSIVSTATVRLACGDEIKSEAATGNGTVDAIYHAMNRITGYPIKLLSYQLSGKGHGKDALGQVNIIVECFGRRFHGVGLETDVIESSAKAMIHALNNIWQAEQVKKEKQRIQDNISKSTTKETK

SEQ ID NO: 6882 - protein, 94 aa, Xenorhabdus sp.
MYERCVNEGKPNEYNLYRMMIDKSHQNKGIGSLAMKLLLDEMKQYADCYKISVCYDETSQRHSQFYQRFGFTEVGYCDEYEEMLAEIIIENKIR

SEQ ID NO: 6883 - protein, 130 aa, Xenorhabdus sp.
MAELQPERLKKVEQDRAFIISTLSDDNFNLLVADDNNGNIKGFCIAQKKQTPPFNCLVQRKYGYVIDLFVSQDVRNQGVGQKLLAEMKKWAKENNFTHLELTVLSENISATKFYEREGYKEVNKLMAITL

SEQ ID NO: 6884 - protein, 710 aa, Xenorhabdus sp.
MALSSSIKNQISQWYKALSTHIDGFIPRAPQRQMIAEVAKTLADDEGRHLVIEAPTGVGKTLSYLIPGIAVSRAEQKLLVVSTANVALQDQIYSKDLPLLRKIIPDLKFTGAFGRARYVCPRNLEAICAAEGEQIDLMLLVEDQTAVANSEERELCRRLRNDYSTFGWDGLRDHHQLALSDSLWSKVSTDKMNCLARNCQFYHRCPFFLARRQIEDSDVVVANHSLVMAALESESVLPEAKNMLLVLDEGHHIPDVARDSLEVEGEITLFQLNGQLDSFVRHVEQYLLQFRPTKPPALAEITRLQAHCEKIRECFRELADITQALLPERGDAEEYLFELGKLPDNLLLCCQTLFKLTDGLRSLSEAILNDLTDQTAKQDIVRLHRAILLTSRTLGYFENMAKLWRLASQEESSHAPISKWLTRRYEKNQSHLYFHCAGIRVSEQLTQLLWRNIPHIVVTSATLRSLNSFSRIQELTGLHENYDDRFVTLTSSFEHVRQGRLIIPRMTLEPTIHNEMQHLEEMARYFRSQILLGAHQGMLVLFSSQRAMEGFLQFVKDLRLMLLVQGDQPRYRLVETHCKRIDEGQPSVLVGLQSFAEGLDLKGNYLSQVHIHKIAFPPVTNPVIITESEWLKSLKRYPFEVQSLPSASFSLIQQVGRLIRSHECHGDVVIYDKRLLTKRYGSRLLDALPVFPIEQPDIPSEEILLKMKKG

SEQ ID NO: 6885 - protein, 424 aa, Xenorhabdus sp.
MKLETLSIHAGYSPDPTTKAVAVPIYQTTSYAFDDSQHGADLFDLKVEGNIYTRIMNPTNDVLEKRIAALEGGVGALAVASGMAAITYAIQTITGLGDNIVSVAKLYGGTYNLMTHNFQNIGIEVRFIDHDDLAALESMIDERTKAVFCETITNPSGNIADIRAFADIAHRHGIPLIVDNTVATPYLCRPFEHGADIIVHSLTKYIGGHGNSMGGMVIDSGNFPWADHKDRFAVLNTPDPSYHGINYLEHFGVAAFIARCRVGQLRSTGASLSPFNAFLILQGLETLALRMERHTENALKVAQYLEQHPLVSWVKYAGLPTHPEYDLAVRYMGGKPSAILSFGIKGEEKAATRFIDALQLITRLVNIGDAKSLACHPASTTHRQLNEKELIKAGASRDLIRLSIGIEHSDDIIADLAQALDMAK

SEQ ID NO: 6886 - protein, 323 aa, Xenorhabdus sp.
MRVLLAPMEGVLDSLVRELLSEVNDYDLCITEFLRIVDSLLPVRSFYRLCPELHRQSRTPSGTPVRIQLLGQDPSWLAENAVRAVELGSWGVDLNCGCPSKTVNGNGGGATLLKDPELIYRGAKAMRQAVPAELPVTVKVRLGWDSDARQFEIADAVQQAGATELVVHGRTKEDGYKAERINWQAIGEIRRRLAIPVIANGEIWDWQSAQECLKVTGCDSVMIGRGALHVPNLSRVIKFNEPKMSWHGVLRLLQKYTLLEKQGDTGLYHVARIKQWLGYLRREYSEAEELFMQVRALKTSSAIAEVISQVVENDMYLIDNALV

SEQ ID NO: 6887 - protein, 444 aa, Xenorhabdus sp.
MNFESLGLKADILRAIEEQGYAEPTPIQQQAIPVVLSGKDLLASAQTGTGKTAGFTLPILQLLSESPIQSKGRRPVRALILTPTRELAAQVGENVHNYSKYLRLRSFVVFGGVSINPQMMKLRGGVDILVATPGRLLDLEHQNAVDLSHVEMLVLDEADRMLDMGFIHDIRRVLNKLPAKRQNLLFSATFSDEIKNLANKLLRDPASVEVARRNSASEQIEQAVHFVDKKRKGELLSYMIGSQNWQQVLVFTRTKHGANRLAEQLNKDGVTAAAIHGNKSQGARTRALADFKSGQIRALVATDIAARGLDIDQLPHVVNYELPNVAEDYVHRIGRTGRAEATGQAISLVCVDEHKLLKDIERLLKREIPRITTPGYEPDPSIKAEPIQNGRNGRSNQPRAQRTGDKQGATRQNHGHSRNKNVWPKNASSQKPRNRRSVKAVAGE

SEQ ID NO: 6888 - protein, 405 aa, Xenorhabdus sp.
MFSINKSSKLDNVCYDIRGNALKEAKRLEEEGNKVLKLNIGNPAPFGFEAPDEILVDVIRNLPTAQGYSDSKGLYSARKAIMQHYQARNMLDVTVEDIFIGNGVSELIVQSMQALLNTGDEMLVPAPDYPLWTAAVSLSSGKTVHYLCDEQQGWFPDLDDIRRKITPRTRGIVIINPNNPTGAVYSKELLLEIVEIARQHNLIIFADEIYDKILYDEAQHHSIAALAPDLFTVTFNGLSKTYRVAGFRQGWMVLNGPKKQAKGYIEGLEMLASMRLCANVPMQHAIQTALGGYQSISEFILPGGRLYEQRNHAWELINQIPGVSCVKPMGALYMFPKIDTKRFNIYDDQKMVLDLLLQEKVLLVQGTAFNWPEPDHFRIVTLPHTADLQMAIEKFARFLGNYRQK

SEQ ID NO: 6889 - protein, 192 aa, Xenorhabdus sp.
SHFFAQLSRLKLINRWPLMRNVRTENVSEHSLQVAFVAHALAIIKNRKFNGNINAERIAILAMYHDASEVITGDLPTPIKYYNPQIAHEYKKIEKIAQHKLLDMLPIELQNDFRSILDDQYHTEEEANIIKQADAICAYLKCLEELSAGNSEFNQAKIRLEKTLEKRHSQEMDYFITVFVPSFSLSLDEISL

SEQ ID NO: 6890 - protein, 400 aa, Xenorhabdus sp.
MSSKLVLVLNCGSSSLKFAIIDPANGEEYLSGLAECFGLPEARIKWKIDGAKNEAALGAGAAHSEALNFIVNTILSEKPELSAQISAIGHRIVHGGEKFTSSVIITDEVIEGIEAAIPFAPLHNPAHLIGIAEAKKAFPHLVEKNIAVFDTAFHQTMPEEAYLYALPYNLYKEHGIRRYGAHGTSHFFVSREAAKMLNKPAEELNTIICHLGNGGSVSAIVNGQCVDTSMGLTPLEGLVMGTRSGDIDPAIVFHLYDAMGMSIDQINTLLTKESGLLGLTEVTSDCRYVEDNYETKADAKRAMDVYCHRLAKYIGAYSALMEGRLDAIVFTGGIGENSALVRELTLKKIALLGFEYDHDRNLAARFGKDGVITTDNSRPALVIPTNEELVIAQDSARLTA

SEQ ID NO: 6891 - protein, 714 aa, Xenorhabdus sp.
VSRTIMLIPTGTSVGLTSVSLGVIRSMEQKGVRLSVFKPIAQPRNSGFQDRTTTIIRSHTSIHAAEPLAMAHVESLLATNKKDVLMEEIVANYHANTKNAEVVLIEGLVPTRKHPFAQSLNYEIAKTLNAEIVFVTALGTHTPEQLKEQIELSRAEYGGNKNKNIIGVIINKLNAPVDDQGRTRPDLSEIFDEATKATVANVDQATVFKNSPLPILGCIPWSFELIATRAIDMAKHLKAEIVNEGAIQTRRIKSVTFCARSIPNMLEYFRPGSLLVTSADRPDVLITACLAAMNGIEVGAVLLTGGYKIDDSIRELCERAFNTGLPVFTVNTNTWQTSLNLQSFSLEVPADDHERIEKLQNYVAQHISNEWIDSLAATSERPNRLSPPAFRYQLTELARQAGKRVVLPEGDEPRTVKAAAICAERGIAECVLLGDPEEIRRVAAAQGVELGAGIEIVNPATVRERYVPRLVELRKNKGMTEVVAREQLEDNVVLGTMMLEQNEVDGLVSGAVHTTANTIRPPLQLIKTAPNSSLVSSVFFMLLPEQVLVYGDCAINPDPTAEQLSEIAIQSADSAKAFGIDPRVAMISYSTGNSGAGSDVEKVREATRLAQEKRPDLIIDGPLQYDAAIMADVAKSKAPNSPVAGQATVFIFPDLNTGNTTYKAVQRSADLVSIGPMLQGMRKPVNDLSRGALVDDIVYTVALTAIQATQQENA

SEQ ID NO: 6892 - protein, 324 aa, Xenorhabdus sp.
MINANRQIINLDLDLLRTFVAVADLNTFAAAAAAVCRTQSAVSQQMQRLEHLVGRELFARHGRNKLLTEHGLQLLGYARQILRANDDATASLTYNDADGELRIGASDDTVDTLLPFLLNRIASVYPRIAVDVRIKRSQFIESMLDNHEIDLALTTAKINHHPSTVLRSSPVLWHCAPDFQLQVNEPVPLVVMDETNTFRQIALDTLDMSGIPWRIAYEAASLSAVRSAVNAEVGITARPLEMQNADLRILGESEGLPRLPEIQFFLYRNSNEQNESVLTVFDAIENKKTPYTVTSIESDETDDIDESDDSLESIEESSVENINE

SEQ ID NO: 6893 - protein, 591 aa, Xenorhabdus sp.
FTTNKVRMDVVALLVITAFVLSGTLSLNEATIGFSDPNVLLIAALFVIGEGLVRTGVAYQMGDWLVRVAGNSETKMLALLMLSVAGLGAFMSSTGVVAIFIPVVLSVAARMQTSSGRLMMPLGFAGLISGMMTLVATPPNMVVNSELVREGLQGFGFFSITPIGILILLAGIIYMLLVRRWLGSKTPARPDERYHRSFRDLIRDYKLSGRARRLAVRQNSPLIGHTLDELGLRARYGANVIGIERWRKFRRVMVAATGETELRQQDVLLVDMSDSDIDLRQFCSEQQLEPMILRGEYFSDQSREVGMAEISVIPESDLLGQSLRSMRFRTRYGLNVVGIRRSGKALAGKLFDEPLLLGDTLLVIGDWKLVRELRTKAPDFIMLNLPVEVESAAPAASQAPHALFCLALMVAMMLTNEVPNFIAALIACLLMGQFRCIDMVSAYRAIHWPSIILIVGMMPFALALQKTGGIDLIVSGLMDIAGNMGPRAMLVCLFILCAVIGLFISNTATAVLMAPIAIAAAKQMAVSPLPFAMIIGVAASAAFMTPVSSPVNTLILGPGGYRFADFLKLGVPFTLVVLAISVAVVPVLFPF

SEQ ID NO: 6894 - protein, 220 aa, Xenorhabdus sp.
CRGFLFDLDGTLIDSLPAVERAWIKFADKLGIDRDEVLNYVHGTPALLSIRHFMPDATEEEIISTFKWIEKIETEDMEGITALPGAIALIDKLNALEIPWAIVTSGTIPLASARHKEAELPEPAHWVTAESVKNGKPNPEPYLLGAQKLGLLPEECVVFEDAAAGIHAGLDAGCQVVVVHDEPGISRRDEIHMTVTNLEDIEIVKSGGYVTIYQMNQIDC

SEQ ID NO: 6895 - protein, 151 aa, Xenorhabdus sp.
MNTMPPANHGWFKKVQLGQQYLKTWPLEKQLAPVFPENRIIKATRFGIRFMPPLAIFTLTWQIALGGQLGPSIATALFACSLPLQGLWWLGKRAATPLPESLLKWFYEIREKFAEAGIAMMPVENTPTYLSLAELLKRAFKQLDNSFLDDI

SEQ ID NO: 6896 - protein, 193 aa, Xenorhabdus sp.
MAEKSIVQEAKDIQLAMELITLGARLQMLESETQLSRGRLIRLYKELRGSPPPKGMLPFSTDWFMTWEQNIHSSMFYNAYRFLLKSGHCAGVEAVVKSYRLYLEQCPPSDGDAPVLALTRAWTLIRFVDSGMLQPTECRCCGGTFITHAHQPVNSFVCSLCQPPSRAVKKRKLSAQPADTNSQLLDGFAQQAM

SEQ ID NO: 6897 - protein, 116 aa, Xenorhabdus sp.
MSTVELLKHIYDINLSYLLLAQRLINHEKASAMFRLGISESMADTLAELTLPQLVKLAETNQLICHFRFEDHETVQQLTKESRVDDLQQIHTGILLSTHLFQQLSAQDDTSMKKRA

SEQ ID NO: 6898 - protein, 293 aa, Xenorhabdus sp.
VLVLLGYIVVFGAVIGGYLLVGGHMGALYQPAEFLIIAGAGIGAFIVGNNGKAIKATLRVLPKILRRSKYNKAMYMDLMALQFRLLSKSRQHGLLSLERDIENPQQSDIFTQYPRLLQDPYLMNFITDYMRLIVSGNMNPHEIEALMDEEIETYEQESEVPATSLAMVGDSLPAFGIVAAVMGVVNALGSADRPAGELGVLIAHAMVGTFLGILLAYGFVSPLATLLRQRSSEQIKMMQCIKVTLLSSLNGYAPQIAVEFGRKTLFLTDRPSFTELEEHVRRVKAPVQQEAEE

SEQ ID NO: 6899 - protein, 333 aa, Xenorhabdus sp.
MRANNVTVVRVKKRKKHGQPHHGGSWKIAYADFMTAMMAFFLVMWLISIASPQELTSIAEYFRTPLQVAINKGQQSSDTTNPIPGGGDDVFQQDGEVFRQTKQVEVSEDRRRLDRLRQQLDQLIITDPRLKALRPHLLIDMMDEGLRIQIIDRENRPMFMIGSAKVENHMSDILQAIAPILNSIPNKVSLSGHTDNLQYISGQRGYSNWELSSDRANASRRELLIGGLDESKIMRVVGMASTVSMQKGIPADAPVNRRISIIVLNKEAEQRIEQENSGGNAMTANSSMDIQEVIRMDSNEGTPSQQPTGQSNEITVPEQTNTEPASDPNKVTE

SEQ ID NO: 6900 - protein, 386 aa, Xenorhabdus sp.
MDITAFYQTFFDEADELLADMEQHLLLLDADEPDHEQLNAIFRSAHSIKGGAATFGFSKLQQTTHVLENLLDSARRDEIRLTTDIINLFLEAKDIMQQQLDAYKSSQEPDEDTFNYICETLRQLALELQEEQQNIADSAESSEFEPVTEEIIQHVAEIQEKQEEHVTPVEQPEEKNLPTTTSATEQGRIRVHLSGLKEREVALMKDELGHLGEIYDVEQTTDSLEASLITSATEDDITAVLCFVVEPEQITFLPVVESQQVEVKTEENTTQPTVQETSVTANATDSTSDVEKGLAQLPASPSADTRKKTDVSEAGRPAPRPMAGSPRQRVESSSIRVAVEKVDQLINLVGELVITQSMLAQHCDALEPTIHSELLSCMGAIAAKFP

SEQ ID NO: 6901 - protein, 334 aa, Xenorhabdus sp.
MMPMEYVFSRYPRLVRDLAGKLNKKVELALIGSSTELDKSLIERIIDPLTHLVRNSLDHGIETPEKRLAAGKSETGNLTLAAEHQGGNICIEVIDDGAGLNREKILAKAQSHGLAVNENMSNEEVAMLIFAPGFSTAEIVTDVSGRGVGMDVVKRNIQDMGGQIQINFQEGKGTVIRILLPLTLAILDGMSVKVNDEVFILPLSAVVSSLQPQEEDIYPLAGDEKLLQVRGEYLPLLELYRIFDIPGAETAPTKGIAVIVQSAGRRYALLVDKLVGQHQVVVKNIESNYRKVPGISAATIMGDGSVALIIDIPALQKLNHEQLAVRKAEFANKK

SEQ ID NO: 6902 - protein, 165 aa, Xenorhabdus sp.
MAAIDEFSKLSGETAGKEYLVFTLGDEEYGIEILKVQEIRGYDQVTRIANTPAFIKGITNLRGVIVPIIDLRIKFSQEDVTYNDSTVVIILNLLNRVVGIVVDGVSDVLSLKDDQICPAPEFAVTLSTEYLTGLGSIEERMLILVDIEKLLNSEEMALVDSVAKE

SEQ ID NO: 6903 - protein, 567 aa, Xenorhabdus sp.
MFNRMKIVTGLISVIILFGALQFMSSGLFFNSIKNDTKAFDTLDELRQRQKLLDESWINLLQARNNLNRVGIVYIMQINGGESEYKIDDILAEAKVNLSRAELRFQQFEQMPNLSIRDPERMQRLKQTHSVYINALKELDVLLAKKEFKAFFAQPTTMYQNAFDTEYIFYLGQNEKLYEQVSDEADIAYRNVIISLIFVFVLLIGVMTVSWIGLRKALIDPLNNLLDSIKAFSRGDLTRTIDVSGNNEMGVLSVGLKHMQEELINTVRSVHHSTETIYTGTSEIAAGNNDLSARTEQQVASLEETAASMEELTATVKQNADNARQASNLADNASEIARKGGKVVANVVQTMHEIADSSRKISDITGVIDAIAFQTNILALNAAVEAARAGEHGRGFAVVAGEVRNLAQRSAEAAKEIKSLIEDSVSRTDTGSELVESAGETMNNIVNSVTRVTDIMGEIASASDEQSRGITQVGVAISEMDRVTQQNASLVEQSAAAAAALEEQAMILTKAVAIFQLPEQADRKLPEKRKHEVLSTRKSPTPPANKTNPPVLKKGSDVEDPSNWETF

SEQ ID NO: 6904 - protein, 322 aa, Xenorhabdus sp.
MQMISSGLSLGIIYTDQSYIERIDLGTQRRDSLGVSWTALLQTRNTLNKIAIAQKVGQPKEQIDAMEALLKHSLSEAERSFNQFNSLPQVGKNERRDGLLTDLDRAYRDYFSALKEMKEFLYGGDFQAFLDQPTEEYQLKMELAYKHYMQYLNKNIEDTVENAAFYYKVAIAMFFGSILMVFIVAIAAHWWLKRNLLRPFDNMRACFQDVAEGRLDKEVAVTTDDEIGDIFRKLRDMQRSLIKSISSVRDNTNQMYVGIQEITQGNTDLSSRTEEQAASLEETAASMEQLTVTVKQNAEHARQASALAVAASQTATKGGEQT

SEQ ID NO: 6905 - protein, 104 aa, Xenorhabdus sp.
MINQVLAKMPPIYDVKERKKISMEIEGLFQVATERFKLTHRNDLVAFALYGVTVNLMFYEHKYFKALLIDSAEYEEYFSRVMLNVNDPKLKEVKENLLQVNVLS

SEQ ID NO: 6906 - protein, 790 aa, Xenorhabdus sp.
VLANTLNRYTLGIQGCDAVLDVEDFTGREAMSDTYRYRIAFTSSEQDIQPQQMLRRSATFTLRTLGETVFGINTPPKTQRVVHGVVTDFKRLGGSRDEAQYQIILEPKFALLRNQKRSYRFFLNKSVPEIVEEILREHNFKGWEFEFNLKNTYPKREQINQVNESDREFIERLLSELGIFYTFRLQPDTQTEVMHFGDKQRCYEYGKTLPLNSPSGMNDNNEASIWGLTQRHQVVEHSVQTKDYNFRTAQHILNSAQADMTRGDGEKITYGDVNYYKLRHLTTGDKLSPEPETANFWAQLDHERFLSRQTLLYGQSTDPTLMAGQVLEIEDRTLPSTLPAAFQSKILMTQLRFTGSRAEALLVKITAVPYTEGLCWRPSLKPRPVISGTLTARVTSPIANDPYAHQNLDGLYWVKFDADSDQKKKGYESMPVRLAKPYGGDTYGFHFPLIQGTEVAIAFHEGDPDRPYIAHALHDSYHPDHITARNRTRNVIRTPTNNKLRMEDRRGQEHIKLSTEYGGKSQLNLGHLVDSNEKKRGDGFELRTDSWGAIRAGRGLFISADEQERAFGEQLDLTQIKQQLADALDMAESLSNIMRMAQIEPLDTSNQERFLEGYIDGINEPVIAASAPGGIALSTPNHIQHSANNNIVMTSGRNTEISALKRIAIAAKKAVSILAHELGMKLVAVAGKLQIQAQTDALEITAKKNISITSTDDEIIISAKKKITFECGGSYITIDPTKIESGTEGDFKVQSANFDYAGPATISVPHPNFTACETLSSEAAGRGDATVPLS

SEQ ID NO: 6907 - protein, 885 aa, Xenorhabdus sp.
MLLRRLNPYCAQALEAAASLCQTRAHAEITVEHWLLKILERGESDITVLARRYEWDMGALWQSLLDHIDAYPRTVHSRPQLSSPLLTLIKNAWLSASLEEGEGHIRSIHLLFALLETPSLVSCEGAWPLLTVGTSQLQRLRPVLDAQFEERPEVQQQAMLGHDNTTFSPDSPTTSPERTTPLTDKPLSDALLAVLDKFTLDVTAKAKVGNIDPVFGRDDEIRQMIDILSRRRKNNPILVGEPGVGKTALVEGLALRITEGNVPESLKTVSLRTLDLGLLQAGAGVKGEFEQRLKNIIDAVQQSPTPILLFIDEAHTIIGAGNQAGGADAANLLKPALARGELRTIAATTWSEYKQYFERDAALERRFQIVKVDEPDDEKASLMLRGLKPRYAKYHGVHITDDALKAAVTLSRRYLTGRQLPDKAVDLLDTASARVRMSLDTQPDELVRLRSSLAALDLEAEALQEDHFVGNAVEVSRLIDITQQREALENQLQLTEAQYQQEKALTEQLLDCRQSGSNAGENARLQQQLAEIQNGAPLLGLDVDVRTVATVIADWTGVPLSSLMKDEQADLLSLEQHLEKRVVGQSAALESMAQRLRAAKTGLASENGPLGVFLLVGSSGIGKTETALALADSLFGGEKSLITINLSEYQEPHTVSQLKGSPPGYVGYGQGGILTEAVRKRPYSVVLLDEVEKAHRDVMNLFYQVFDRGFMRDGEGQEIDFRNTVIVMTSNLGSDHLMQLLDEQPESTDSTLHELLRPILRDHFQPALLARFQTVIYRPLGAQALRTIVEMKLAQVAKRLKLHYRLDCVVEESLYNTLVEACLLPDTGARNIDSLLNQQILPVMSQQLLMRQATQQTANTLTLGYDEEGITLTFDKEILSGEDRS

SEQ ID NO: 6908 - protein, 228 aa, Xenorhabdus sp.
LNIHGDAQQSGIRAEWAFFRNQTQIDTLRTQFIYKKGNNYLNDEKIIVSSESISLVSLNLNHFQIIPAGFFSIDIGIDKGVPWFNTQTVMDKNFIKGLMSINLQKKFRLFDSSYLFNSQISMQYSRDPLPAMECFSITDKNSIRGFNESFLCSDNGWYLRNTLSYLLPIAIPQGYLALNIGGDLGQTKIIGHKNKYEWINAVGMSTGFSLSYKQLFADIQALEHMDRA

SEQ ID NO: 6909 - protein, 284 aa, Xenorhabdus sp.
KIFIAGYNLSGFGGMETVFDNFHRLLSHNDNYDVLFVFFEDKFKNPDDRWIGEKKFVRIKSNIKNTKIRRFHFAYKFSKLISQHNPKHIISYDSLTCYISLWARRFSFKSTNIISWCHFTLHDMYKVEYILLADKHLAISSGIATQLYNMGVNQKNIYTVFNPVTPKLEVITREKNISFLYLGRINFNGQKNLKELFLSLSRINGDWSLNIVGSGDSQEIDKLKKLAILLKIENRIKWHGWQQNPWAYVRENIKNVTCLLLTSSYEGFPMVLCESISYGVYVIS

SEQ ID NO: 6910 - protein, 89 aa, Xenorhabdus sp.
MKIFVINLEKDIDRKLSIQDQLEKANLNAEFITGVYGRGLSDEQLKKICPDFNKIYLTLGEVGCSMSHLNVYKKMIDKNISISLILEDD

SEQ ID NO: 6911 - protein, 444 aa, Xenorhabdus sp.
MKESSAELVEIFRHSVPYINAHRNKTFVVMLGGEAIAHENFPNIVNDIGLLHSLGIRLVVVYGARPQIDQNLTEHHCQPVYHKYTRVTDARTLDLVKQAAGLLQLDITARLSMSLSNTPLQGAHINVVSGNFIIAQPLGIDDGIDYYHSGRIRRIDDEAINQQLDNNSIVLIGPVAVSVTGESFNLTTEEIAAQLAIKLKAEKLIGFCSSQGVTDAEGHTLSEMFPNEGEIRLNNLENAGDYSSETVRFLRGAIKACRRGVRRSHLLSYQENGSLIQELFSREGIGTQIVMERSGQIRRANINDIGGILELIRPLEQKGILVRRSREQLEMEIDKFTLIELDNITIACAALYSYPEEKIGEMACVAVHPDYQNSARGEVLLGAIINQARQSGLEKLFVLTTQSIHWFQEKGFEPAEITMLPVEKQALYNYQRRSKILMLDLKIH

SEQ ID NO: 6912 - protein, 116 aa, Xenorhabdus sp.
MQEWIDYINQDDEMRLDGYAEALFSNGETLICVDESMAVWTQHPDQSITSWFWLDDGMITTKNPDNHMIKKMHSIARALNAKVQGEGGYDIDKEGKPMIPPEELSFRESKPWWKFW

SEQ ID NO: 6913 - protein, 383 aa, Xenorhabdus sp.
PLKVRQNVTDISEAQFTEINSFYRGHGRAPEENSSASLSEKRLARRLRSLRSSVEKSPNLQRLDEFGLLKNSDVEEVLISCAAEPSAEYLSRAESVTSLDDIFADDDGLLDFDTPEIFVLEHIQIEKKEQPDEIAQRQPCPDFVRYEPIFKRVQNGLQNGHFSTERFSHKLKINVGDFFILNGLMGYVVSIGERLEQYSSYNARMHLVFENGTEMRMLYLSLTHGLVRDKEGRKLQLNGEAIKPSEQAIPTGLVYILATLSVDPVLAPYTHNLYKVGFTESTVENRIKNAEKDQTFLQAPVRIVSTSQCFNLNAHKLEMLIHGFLAPRRLNVTLKSHTGQTYMPREWFYVPLSTVLAVIEHVVNGTISQYRLDNTTGRIVQKK

SEQ ID NO: 6914 - protein, 668 aa, Xenorhabdus sp.
MNNLLHVEYKQTGQSASLNSMGMREMQARAYAERNSQYLLIKAPPACGKSRALMFLGLDKLEHQGVHKVIVAVPEKSIGGSFKNTALTESGFFADWQVSPQNNLCVDGSDKSKVAAFQRFIAGDDHILVCTHATLRFAFDKVDIAEFNHCLVAIDEFHHVSADGDNRLGGLIDELMAKSSAHIVAMTGSYFRGDTVPILLPDDEAKFTKVTYTYYEQLNGYRYLKSLGIGYHFYQGRYIDALPDVLDTHKKTIIHIPNVNSGESTKDKHSEVDAILDIIGEVVLRDPETGILQVEANDGRILRVANLVDDTSSERAKVQTYLRSITSSDDMDIIIALGMAKEGFDWPYCEHVLTIGYRSSLTEIVQIIGRATRDCVGKTHAQFTNLIAQPDAQDEDVRTSVNNMLKAITTSLLMEQILAPTIQFKPRSLWDGKELPANTLLVDDTTSTPVSQKVLDILNGDRNEIMTALLAKKQLIQEAISDTVPPETVTQVELPAIIQTLYPDLTEEEQEQIRLGTLQSMLITQQGGLVDGKDLPPSAIVDWDEDSDKNDKNITGKQFLKMGDKFLCIDNLNIDLIDSINPFRGAYEILSKQVDAAMLKTIQEAVSASKSQVSEEEAVILWPRIKQFTQEFRREPSLNSSDPIEVRYAEALAFIRQKKQQRLAQQGQ

SEQ ID NO: 6915 - protein, 802 aa, Xenorhabdus sp.
KIRFVIITDFLRFLAWDTQTNERLDIDIDELHSYYAFFLPLVGLEKALTSSENPVDVKAAEKMGKLFDLIKINNNLTNTEDIHALNVFLTRILFCFFAEDTGIFSDAQFTSAIKSYTEEDGSDLDAFLYQIFSVLNTPEDSDTRINLPKHINNFRYVNGDLFSSDDPIPELGKKGRRILLDCGSMDWSEINPDIFGSMFQAVIDIEQRSRLGQHYTSYSNIMKVIQPLFIEPLRSDFEKNRKNVNGLAKLLVRIGKIKVFDPACGSGNFLIVAYKELRKLEMEIIMALGEIDPQSIPMSGLHLSQFYGIEIDDFACEVARLSLWLAEHQLNNQWKKEFGDAPPALPLRESGCIVHGNSLHKDWNEVCSKNTEDEVYVIGNPPFLGHVGRTPQQRADMLSVFKGFKSIGYLDYVACWFWKGGNYIINSNAELAFVATNSISQGEQASTIWHPLFKLGLKINFAYPTFTWQNNAKDKAAVHVIIVGLSQQNKKSVLFDFFDNQWHKKQVINISPYIVEGGNFAISPINKPFLKETPSLLFGNMANDGGNLFLSESEKNELIKLGPEYKKWIKRVLGADEFLNGKDRWCLWLCDASKEELESLSAIQEKLNKIRALRLKAGHTNALKMAEKPHCFFQISQPRSGDYILIPRVSSERRKYVPMGFFSHQVICSDANLFVPDGTLYEFGILTSLMHNDWMRLVAGRLESRYRYSASVVYNPFPWPDVSNEKRTMIEKLAEEVLLTREEFPGKTLAELYDPEKMPEPLLKAHQALDKAVDRLYRDKPFKDADERLSFLLARYETLISQ

SEQ ID NO: 6916 - protein, 104 aa, Xenorhabdus sp.
IMLCCGAGISSGMLATKTRNAARKKELSVTVEARSESEVTEYFSVIDILFLGPHYASQQEEFQKHADIYNIPVIVVPQNIYGKLDGEALLELAIATLNNSTTTD

SEQ ID NO: 6917 - protein, 414 aa, Xenorhabdus sp.
MSHSDHNSSRRRLLKGAAALWLLSISPVGHAAASKVIAVRIWPASSYTRVTLESNIPLKYRQFSLVNPNRIVIDLQGVQLNSVLSSMGSKIQKNDPYLKLIRAGQFDPKTVRLVFEIKQPVSPHIFTLPPVAEFKHRLVLDLYPKAAKVDDDPLLALLEEYNSGNLEKHMPAKRKKAGKAGKDRPVVIMLDPGHGGEDPGAIGKHKTREKDVVLQIARRLQALIKRQPGMKVYMTRNEDVFIPLTVRVAKARKMQADLFVSIHADAFTNRTVRGSSVFALSTKGATSNMARFLAQTQNEADLIGGVSKSGDKYLDHTMLDLVQTATINDSLKFGDEVLTRMGKVNKLHKNSVDQAGFAVLKAPEIPSILVETAFISNPEEEKKLRTAKFQQQIAESIFSGIKAYFKNGAELARR

SEQ ID NO: 6918 - protein, 642 aa, Xenorhabdus sp.
MSLLQQAVAQKLLRPLDVQFAYAMVEDENPLLLLITAYLSAEAGAGHVCLPLERVTPEHLFEGRNPELVASLWSLAGEPSRQQIISALQACPAIGDGQSPTPIILSRRGLSDYRLYLQRMWQSECQVAAFFADVALADDIDETQLRSILDELFGVIDKDLVGEEATDWQKVAAAVAVTSRISVISGGPGTGKTTTVAKLLAALIKLNEGRQLSIQLAAPTGKAAARLTESLSEAVSKLVLTDEQRRSIPDQAQTIHRLLGAQPESQKLRYHRGNPLSLEILIIDEASMVDIPMMARLIEALPAKAKVIFLGDKDQLASVEAGAVLGDICRFAEQGYSVARAAQLARLTGCQLAPYSESEPEDAALAVRDSLCLLRKSYRFNFASGIGQLASAVNQGNSRRVSTVLKQPLSDVYFNTLADDEDYQRLLTETAEGYQRYLTLVKERASEKEILAEFNRFRLLSALRDGPFGVSGLNQRVEQLLHSKGMVVLPRYSGNRHSYIKKEYAEKENRGYVGRPIMILRNDSTLGLFNGDIGIMLKDQNDELKAYFQLSDGQIKPFQPSRLPLHETAYVMTVHKSQGSEFEHTALVLPTQFSPVVSRELVYTALTRAREKLTIYAHKAVLVKAVATPTQRRSGLAEWFKA

SEQ ID NO: 6919 - protein, 172 aa, Xenorhabdus sp.
MPTPCYISINGKTQGHITAGAFTAESVGNIFVQGHEDEMLVQEFDHIVTVPTDPQSGQPSGQRAHKPFRFTVALNKAVPLMYNALASGEMLPTVELKWYRTSIEGKQEHFFSTKLVDATIVDIDCKMPHCQDPAKAEFTQLVRVSLAYRKIEWEHTTAGTSGADDWRAPIVA

SEQ ID NO: 6920 - protein, 187 aa, Xenorhabdus sp.
VAQLLLQMIETPLSDVRLILNKAEIDKDLLKEQLDQVMTHHQSIVQTYPNFSPMLVEWLQDSWLLASTEMQHTELRSGVLLIALLFSPLRYLAPQSARLLAGINRELLRQNFAEWTNGSAEQPFSAGDKEGQGVHPANSDSLLARFTQNMTEQARQGKLDPVLCRDNEIDLMIDILCRRRKNNPMWW

SEQ ID NO: 6921 - protein, 259 aa, Xenorhabdus sp.
MSDINVDSPSLEKFEKQAETLKTFQRQYQLPLRGESLNPMIDAATPLLGMVLRLQDMSDQALPDKLYQQVVTDIRAIEQLLQTKGYEPGAIVSFRYVLCTFIDETALGHGWNSQNGWLKQSLLVHFHNETWGGEKVFVLLERLMGEAQRYQHLLEFIYLCLCLGYRGRYKVSTQKSDDFDRLFRRLQQQLHSLRGDAPPTTLYVNVNERDASYRLIRRWKIKHLFAIGIGLLIAIYSFYAIRLGDQTQYILEQLNKLLR

SEQ ID NO: 6922 - protein, 403 aa, Xenorhabdus sp.
MSINDDLLKLGRIGITEASGIMPDGTIFAAPSQDLLPKPLDIENINDLKSKDIYLALPMSSDTIREVADRDAETQSAVRYRELPGDVRDLHTKGGDSSILNLAQLTPVLMQGSEDMSAYTAIPLCRIKEKQKDGTIVLDNEFIPTCLSIFVADKLKRFMVEIDGLLTERSRTLAKRIGSPGQQGIADVAEFMMLQLLNRVQPLYNHYAKQSVLHPLHLYTQLIQTCGELRTFTDASRLPGNILAYDHNNLTDTFQDAMHAIRDALNVVLTPRATSIALKQNEGGIRVATLHDNDLLRKAEFVLAISASTPQEQLRRQFVQQTKVTSMERIRDLVSVQLPGVPLIALSAAPRQLPYHSGYTYFRLDQKSPAWKEIQQGNSIAFHVSGDFPDLDMQLWAIRGGKD

SEQ ID NO: 6923 - protein, 185 aa, Xenorhabdus sp.
MKRSGSQRIWSVGILLLSAMLLNGCSSAWNATKKVGQVIWDPSTPVGRPSDQASVANITLLAEPNINPNESGEPAPVEMNLVYLSEDSRFLAADYDQLESDKLEKALGKNYIDHQDYTLLPGQYKPLEVITLEKKNRYIGVIVHYADVNQSEWKKIIRVKDMGRHYNILVHIRNNDVELRKEEEE

SEQ ID NO: 6924 - protein, 431 aa, Xenorhabdus sp.
MEKHQPTLSLRVINSEQLESGRAASCQFSPQGGTVGSSESHLWSVQDSQGNIHPSQFSIQWRDGAFCLQVLSDAVQINNATLTPQSSLIRLQQGDQIKVGMLSIKIHISFSESDRVDPSTVSPESLVSSYSNPLDAMMEGVSLQKSAFAKDDSVAPTVMHRFSDDPLRVLDSESLTTLKQQVDADDTEQLLPPDHYQSPPFANPISDNRGSVMDQEFLDLPDITSEQHYEDMDVDHVAITPLMRGLDTQLPLHDTQQANDFLQEMGKTMKAAIEGLLALQREQHGLRDKQLRPIEDNPLRLNMDYDTTMQVMFSEQKSPVHLSAPAAVAESLHNLQLHYQANREAISAALDTMLEAFSPEQLLRRFSHYRRSSDVRNKDASWAWEMYTNYYRELASSRQQGFEKLFREVYEQAYDRALRQGLEDASDETFR

SEQ ID NO: 6925 - protein, 277 aa, Xenorhabdus sp.
VVSLTQSKQGYFELEVSFMGLHGSQSPMPGYYLDSLAWEDAQGENRLTDFLNLFNHRLITLLHQIWRKYRYYICFKKGGEDGFSQRMFSLVGLGSEVNRRMLNINHSKMLAYAGLLASPGRSPEVICSLVSHCFDLQDVTLHGWQFRKVTIPVDQQNRLGGTNKGQTIGDTELSVLGQNFTIGSWIGDYSGKFLLSINNLPRDRFLSFLPDGKNYLPLVMFISFVMRSQFAWELRLGLAENQVGGMVLGAQQHNHLGWTSFLGEPEKKPSVTISVME

SEQ ID NO: 6926 - protein, 527 aa, Xenorhabdus sp.
MTIIEYTPDESVVTKATQVKRGTQIMSNALAAHDDIYSNEKQSNGKRDDHSRCTFTLCRDVWLFPLSIQDISVNNSNEQGIIGLNFASKTELNLHELELDKLRFYLSGDDYTTSQLYFWLCYYFRKAELVIGDKVIPLPDFDFVPVGFEREDALLPYPKNAYMGYRILQEYFCFAESFLFFDVKGLPELPEDLKTKDFKLNLHFSQALPPEAKIRHDTFRLHCTPAINLFPMDSEAIELNGSQTEYPLKASYSFPDNYDIFSIDGVESWLTGENGERSRARVGERVYTPFESFNHQIDNEDERSMRYYRLRVKESPFRRGLEHFISFVRGDESDLLRLRLKENVSVSLTCTNRELPLELRVGDINYPSIGSPSFATFRNITRPSVPLYPLLDGGLHWSLLSNMSLNYMSLLDRDALKQVLRTYDFPSIHNRQSKRSSQKRLDAIEKIETEPTDRLFRGQPVRGLRSTLYIRQQAFSSEGELYLFSTILSRFFSLYASVNAFHMLKVINLDNQECYEWPVQIGQHSLM

SEQ ID NO: 6927 - protein, 146 aa, Xenorhabdus sp.
MAALYSWNRGSSASLFERIQGKSFGSSRQSRMRALLDSIKKHLNEVLNSRPGACQSAIELGVIDLNDATATSVDFKQSIEWAIEECIRNYEPRISAVSVSAINDESDPLLLSFHISAEVSLDDINDVVEFSIQLDNNRRYCLERTQ

SEQ ID NO: 6928 - protein, 492 aa, Xenorhabdus sp.
MAQHEENSTALASGATTSLLDEIMSQARMTPENDGYYIAKQGVAAFIGSILDTGSNEEPINKLLVDKMIVELDKKLSEQMDEIMHAKQFQELESSWRSLKMLVDRTDFRENIKINIIHATKDELLEDFEFSPEIIQSGFYKHVYSTGYGQFGGEPVAAVIGNYAFNNTTPDIKLMQYVSSVGAMAHSPFLSSVSPEFFGVNQFTDLPAIKDLKSVFEGPSHTKWRALRESEDSRYLGLTAPRFLLRLPYSSVENPIKNFNYQENVSRDHEHYLWGNTAYLLASCLTDSFAKYRWCPNIIGPQSGGAVNDLPVHLYEAMGQVQAKIPTEVLITDRREFELAEEGFITLTMRKGSDNAAFFSANSVQKPKVFPNTREGKIAETNYKLGTQLPYMFIINRLAHYIKVLQREQIGSWKERQDLERELNMWLKQYIADQENPPTDVRSRRPLRAAEIKVLDVEGDPGWYQVAMQVRPHFKYMGASFELSLVGRLDKE

SEQ ID NO: 6929 - protein, 165 aa, Xenorhabdus sp.
MSKNSPGSVAPKERINIKYVPNTGDQTAEVELPLNLLVVGDLKGKTEDTPIEERPTVSVNKNNFNAVMNEANINLTFNVPNRLDENSEEDLPVNLEIKSLSDFSPDNIAKKVPELNKLLELREALVALKGPLGNIPAFRARLQSLLDDESVREQLLKELEIINKK

SEQ ID NO: 6930 - protein, 74 aa, Xenorhabdus sp.
VAKKLMTIAEQLEQKGREQGLEEGIRQGREEGLKESRKEDKLETARALLQHGVSLDIIVTSTGLSREEIEALKH

SEQ ID NO: 6931 - protein, 524 aa, Xenorhabdus sp.
MTNIGAQALSALEADITDNPVSYCHDRLNRPVCSLEELEKQFSSVSIPECPVDTGIYTRYLSENVLNQVMPVSSPAFVGHMTSALPLHLPVLGKILTALNQNVVKLETSHVLTALERQVLGMMHKLVYNCDDNFYQKWLHNGDHALASFCSGGTVANLTALWACRNQLMPADGDFAGLTREGLARGLIHYGYSGLAILVSELGHYSLKKAVDVLGLGQDALVKIATDKDGKICLDDLLIQLQELRRRNIKPMAIVGIAGSTETGSIDPLDALADIAEREQCHFHVDAAWGGASLLSERYRHLFKGIERADSVTIDAHKQMYVPMGSGMVLFRQPTMADAIEQHANYILRKGSKDLGRHTLEGSRSAMSLMLHSNLHLLGRQGMAALIDAGIEKAHQFADFIHQQEDFELISEPQLCLLTYRYAPPAAIKLMRESSEPIRQKVQDMLNALNQNIQTMQRSAGKTFVSRTSIKPAQWDKQPTTVFRVVLANPLTTPEILEDMIEEQRQLARQSEFWEDLQDLLSSE

SEQ ID NO: 6932 - protein, 173 aa, Xenorhabdus sp.
PRHRYSRKEQEHVDIPNHLDRQFAVTAPNQVWCGDGTYIWTGKRWAYLAVVIDLFARKPLGWAMSFSPDSELTKKALAKAFESRGRPQGLLFHSDQGSHYTSKAFRRLLQRYGIKQSLSRRGNCWDNSPMERFFRSLKSEWVPLAGYANFREAYYSIIQYITGYYSQPIKPAE

SEQ ID NO: 6933 - protein, 398 aa, Xenorhabdus sp.
MSASFYQKINEQLEQTRAEGLFKSERIITSAQDADIAVADGNNVINFCANNYLGLANHPDLIAAAKAGMDSHGFGMASVRFICGTQDSHKELENKIAEFLGFEDAILYSSCFDANGGLFETLFGPEDAIISDALNHASIIDGIRLCKAKRYRYANNNMQELRAQLEKAKAEGAQNILIATDGVFSMDGVIADLKSICDLADEFGALVMVDDSHAVGFVGKHGRGTHEYCDVMGRVDIITGTLGKALGGASGGYTAARKEVVEWLRQRSRPYLFSNSLAPSIVAASIKVLDMLKDGDELRERLWRNANLFREKMTAAGFTLAGADHAIIPVMLGDAKLAQEFAAELLKEGIYVIGFFYPVVPKGQARIRTQISAAHTKEQIELVVDAFTRIGKQLNIIA

SEQ ID NO: 6934 - protein, 341 aa, Xenorhabdus sp.
MKALSKLKPEEGIWMTEVPTPELGHNDVMIKIRKTAICGTDVHIYNWDEWSQKTIPVPMVVGHEYVGKVVAIGQEVKGFKIGDRVSGEGHITCGYCRNCRGGRTHLCRNTTGVGVNRPGSFAEYLVIPAFNAFKIPDNISDELAAIFDPFGNAVHTALSFNLVGEDVLVSGAGPIGIMAAAVCKHVGARHVVITDVNEYRLELARKMGVTRAVNVSKENLTDIMSELGMTEGFDIGLEMSGAPPAFCTLLNAMNHGGRIALLGIPPSDMAIDWNQVIFKGLFIKGIYGREMFETWYKMAALIQSGLDLTPIITYQFSIDDYQKGFDIMRSGQSGKVILNWD

SEQ ID NO: 6935 - protein, 144 aa, Xenorhabdus sp.
LQEIMQFISRNTILSLVWIALLVAVIVLTLKSVFSKSKDITRAQVIHFINKEDGIVVDLRSRDDFRRGHIIGSVNLTPSEIKDNNLGELEKHKKQPVIVVSANGLESKTPAENLVKAGFEQVYTLKEGIAGWTGENLPLARGKK

SEQ ID NO: 6936 - protein, 156 aa, Xenorhabdus sp.
MSEQNNTEMAFQIQRVYTKDISFEAPKAPQIFQEEWQPEVKLDLDTASSELVQGVYEVVLRVTVTATLGEETAFLCEVQQAGIFSVDGIEGTQLAHCLGAYCPNILFPYARECITSLVGRGTFPQLNLAPVNFDALFMNYLQQQSDSQSDEATQEA

SEQ ID NO: 6937 - protein, 339 aa, Xenorhabdus sp.
MNTASMIVIGAGSYGTALAITLARNGHNVVLWGHNPEHVLALQQARCNQAFLPDVSFPDSLQLEAELKSAISASRNILIVVPNHVFGDVLQQIKPHLQPDSRIVWATKGLEAETGRLLQDVAREILGNEIPLAVVSGPTFAKELAAGLPTAIAVSATTSEFGEELQQLFHCGKSFRVYKNPDFIGVQLGGAVKNVIAIGAGISDGMGFGANARTALITRGLAEMSRLGVALGADPSTFMGMAGLGDLVLTCTDNQSRNRRFGMMLGQGVNVDAAQSDIGQVVEGYRNTKEVRALARRVGVEMPITEQIYQILYRNKNVLEAAQALLGRATRDEGEDSHI

SEQ ID NO: 6938 - protein, 278 aa, Xenorhabdus sp.
MRMIDMSREELREVWENIKHEARELADCEPMLASFFHATLLKHENLGSALSYMLANKLATPIMPAIAVREVVEDAYGSEPKMIESAASDIKAVRLRDPAVDKYSTPLLYLKGFHALQGYRIAHWLWKQDRKALAVYMQNQISVSFGVDIHPAARIGCGIMLDHATGIVIGETAIVENDVSILQSVTLGGTGKACGDRHPKVREGVMIGAGAKILGNIEIGRGAKIGAGSVVLRPVPPHTTVAGVPARIVGKPESEKPSLDMDQHFNGMNNGFENGDGI

SEQ ID NO: 6939 - protein, 78 aa, Xenorhabdus sp.
VLDQYYSIADAARALNVSQSAMGRWVHQLKQERQENFPTASPITPEHIEIRDLKKKLQRLEMENDVLKKASALLMSVT

SEQ ID NO: 6940 - protein, 113 aa, Xenorhabdus sp.
MGDVLHTLPALTDAKKHIPNIKFDWVVEEGFAQIPTWHNAVETVIPVAIRRWRKNWFRKDICEERTRFREQLQQQQYDAIIDAQGLLKSAFFVTRLAHGIKHGYDRKSVRFRS

SEQ ID NO: 6941 - protein, 350 aa, Xenorhabdus sp.
MKILVIGPSWVGDMMMSQSLYRTLKALYPNAEIDVMAPEWCRPLLAKMPEVNQALAMPLGHGALALGERRRLGVALRERKYDRAYVLPNSFKSALVPFFANIPLRTGWRGEMRYGLLNDIRTLNKSAFPLMVQRYVALAYDGKAVRSAEDLSHPLLWPQLAVSEQDIAESTAAFNIDDHRPVIGFCPGAEFGPAKRWPHYHYAALAEQLITQKGYQILLFGSAKDNEAGEDIRALLSEDARKQCLNLAGKTSLEQAVNIIAACDAIVTNDSGLMHVASALNRPLVALYGPSSPDFTPPLSDKAEVIRLITGYHKIRKGDSDGGYHQSLIDIQPELVLSSLEKLLQAENQR

SEQ ID NO: 6942 - protein, 312 aa, Xenorhabdus sp.
MIIVTGGAGFIGSNIVKALNDEGYRDILVVDNLKDGTKFANLVDLDIADYMDKEDFIASIVAGDDLGDIDAIFHEGACSSTTEWDGKYMMDNNYQYSKDVLHYCLERQIPFLYASSAATYGGRSDNFIEDRQYEKPLNVYGYSKFLFDQYVRDILPHADSQICGFRYFNVYGPREGHKGSMASVAFHLNTQINQGQNPKLFAGSEHFRRDFIYVGDVAAVNLWFWKNGVSGIFNCGTGRAESFQAVADAVTESHKEKSPSVEYIEFPEKLKGRYQSFTQADLTKLRAAGYDKSFKTVAEGVTEYMQWLNQDN

SEQ ID NO: 6943 - protein, 328 aa, Xenorhabdus sp.
VLSFTLNAHAARLAIVIDDFGYRVHNENKILQMPSAISIAVLPDSPHGREMAQKAHKQGREILIHLPMSPLSKQPLEKNTLHPSMNKEEIEAIIYDAIQKVPYATGMNNHMGSAMTSNLSGMKKVMGALSQYHLYFLDSVTIGSTQVSKASIGTPVQILRRNVFLDNVQTEAETLHQLNRAIALARKQGSAIAIGHPYPTTIRALRQGLATLPDDIELVAPSKLLNLARPDKQTEQKCINSQKSKTESGITSESRVQYLKMVGETLVPGAIIHILQQHFEKLHSTDQIKSQQEEAMKDKSLQDKAGIKEKTTQNKTGAHKAVSTCSGS

SEQ ID NO: 6944 - protein, 390 aa, Xenorhabdus sp.
SENKNQLKDIQQDIAEKEKSVKQQQKQRTELLSQLKEQESTISEVGRSLHSTQLHLNKLGNEITSLTKNIQRLLMQQKEQRKRLASQLDAAFRQGNHQGLELLLNGPEAQRKERILAYYSYLNQAREETITKLQETTDKLNQQKKLQQGKQNEQQTLLSSQKQQKQKMEVARTARQNTLTTLESALKKDQQSLAELRQNETRLRNKIAKAEREAKARAEREAREAARVRAQVAAKQKQAQQKGSSYKPTEDERALMARTGGLGRPAGQAIWPVRGRVIHSFGETIQGELRWKGIVIPAAEGTEVKAISDGRVLLADWLQGYGLVVVVEHGKGDMSIYGYNQSALVSVGQQVRAGQPIALVGSSGGQQQPSLYFEIRRQGRAVNPLPWLGK

SEQ ID NO: 6945 - protein, 167 aa, Xenorhabdus sp.
MLNIVLFEPEIPPNTGNIIRLCANTGCQLHLIQPLGFTWDDKRLRRAGLDYHEFANIKQHHDYQAFLESEGLSSANSQSPTGTRLFALTTKGTPTHSNVSYRDGDYLMFGPETRGLPPYVLDNMPPEQKIRIPMLPDSRSMNLSNTVAVVVFEAWRQLGYQGALLRD

SEQ ID NO: 6946 - protein, 73 aa, Xenorhabdus sp.
MDTFTISQTRENLAAVIDKAVAGQPVEITRRGREPAVIISKKEFEALQKAKLDAEFADIVGLFDKSNRELTDR

SEQ ID NO: 6947 - protein, 89 aa, Xenorhabdus sp.
MNREFYEGITDIYELAATYWLAIARGHIFTDGNKRAALNTTMLFLKRNGVEVYDHPELVELTVKAAKGDFIPKQLAVKLREYFEPKLNA

SEQ ID NO: 6948 - protein, 387 aa, Xenorhabdus sp.
MFHLTLRNIHLAAHADNKEDAIQQVADVLTTAGYVSKEYVDGMLERETQSSTYLGNGIAIPHGTHATRGNVLHTGVQVMQFPDGVDWGDNQTAYIVIGIAAKSDEHLKLLHQLLPILSDENRASQMAKTTSADELYRLLMNPQPPYLLDASTITLDIYARDLETLQALNLARLQKTSSVNAAFIADILARSPIHLGQGIWLSDSSQGSLRNAVAIARPKASFSISTDNLDEKPVSLLITIAYAGDQLHSLLTNLNNLIQQGKGEQLQRAQDHSALITLLTTKAAQQATSQAKNTLTADFILPNEHGLHTRPSALLVNTIKQFSSRITIIHLDGDTIIPVDGRKLMLVAGLGIKRGDRIRFTASGPDAKEALDAIKNLINNNLGEDIA

SEQ ID NO: 6949 - protein, 327 aa, Xenorhabdus sp.
MNKRVATITLNPAYDLVGLTGGIKTGEVNRIQTAGLYPAGKGINVAKILKTLGIDVTVGGFLGKENQSNFQKTFAELGITDRFQIVEGRTRINVKLTEQNGLVTDFNFSGFNINKEDWQSFAKNSLTWLREFNMVCVSGSLPAGVEPDDFTDWMQQLREACMCVVFDSSREAFTAGIKAQPWMVKPNRHELEIWAGRPLLTQEDIIGAAQQLRAEGISHVIVSLGEEGAILVNSAGVWHARPPHCEIVSTVGAGDAMMGGLIYGLMMGQPCEHTLRLATAISAMTVSQSNVGNIDRQQLACLMTKVELISLKKQSKKTAIEKPTTIR

SEQ ID NO: 6950 - protein, 527 aa, Xenorhabdus sp.
MNILIISNEKQGQARAYLARQTLENVIAQHGLTLTDDLSTAELVIIIGESVPDSLNLPDNKLHGKKIFIGSAEQIISEPEVFLHKAQTEASVYHQQHTADTAESKVQQKPVNIVAITACPTGVAHTFMAAKALETQAQKRGWQIKVETRGSVGSENSLTNAEIAAADLVIVAADIEVELTPFSGKRLYRTSTGAALKKTASELENALTKAEIYTATSTTSVPSRNNQANTSIYQHLMTGVSYMLPMVVAGGLCIALSFVFGIEAFKEPDTLAASLMQIGGGSALALMVPVLAGYIAYSIAGRTGLAPGLVGGMLAVSTGAGFLGGIIAGFLAGYVAKSLTTRLRLPQSMEALKPILIIPLVATLATGLIMIYVVGKPVSAIMEWLTHWLKSMGTTNAVILGAILGGMMCTDMGGPVNKAAYTFGVGLLSAQSYGPMAAIMAAGMVPPLAMWLATVIARTKFDQSEREGGKAALVLGLCFISEGAIPFAAKDPVRVLPSCILGGAVTGALSMYFSITVYKFKCDTPIS

SEQ ID NO: 6951 - protein, 32 aa, Xenorhabdus sp.
MVKQCDYGAPSQRNKLKKADWSDDYYAQVFFG

SEQ ID NO: 6952 - protein, 466 aa, Xenorhabdus sp.
MSTLNRLQKRLSRQGIETYYENNTYHFNQNQVEAKVLLPESLPLEEKAVQQLLDLAAVRVPGSDAKVCQARATPDFHPGTTAPVGSVVATTEDLVIPAAIGTDINCGMRLLTTGLSYEEANSQKEALVQQLKNVLLLDQRNVPVTPQSFGALFDEGLSAWLQELPRQGIWQQADFSRMYAELSAVLSTHAVKAHSRYAPEAFFEHREIIRPASLGTVGSGNHFVELQIVDTIFDRHAAYAAGLREGDILIMIHTGSRDVGFYVGQRWSDKAKALWPATEKYPASGLFGLTAEHAQEYLLAMGVAARYAWANRIVLTELVRSKWQKVFEQDKSRLLVDLSHNIIFPEQGMNLHRKGATPARAGELALIPGSMGDYSYLVMGKGHSDWLWSCSHGAGRSVRRQEMRSKALKPQENRGLPWQCITLKSERLREEAPSAYKPITPVIEVQEQAGLIKSVARVRPWLTFKA

SEQ ID NO: 6953 - protein, 354 aa, Xenorhabdus sp.
MKNSMKKWFYLLAAGMMALSIGSVNAAAENDGKTLYFYNWTEYVPPGLLNQFTKETGIKVIYSTYESNESMYTKLKTYKDGAYDLVVPSTYFVSKMSKEGMLQKIDTSKLKNFHNLDPNLLHKSFDPKNEYSIPYIWGATAIGVNSDNIDPKTLTSWAEFWKPEYKNSLVLTDDAREVFQMALLKLGYSGNTTDPKEIEAAYQELRKLMPNVLAFNSDNPANPFMEGEVDVGMMWTGSAYVARQAGTPIDIIWPKEGGIFWMDSLAIPENAKNVEGAMKLIDFLLRPEIAAQVAETIGYPTPNLAAKKLLPASVSGDKSLYPDESVIQKGEWQSDVGNANVLYEDYFQKLKAGQ

SEQ ID NO: 6954 - protein, 213 aa, Xenorhabdus sp.
YSLLFNNDSLLQAAGHSLTMAVVSATFATLIGSLTAVALYRYSFRGKKFVSGMLFVVMMSPDIVMAISLLVLFMLLGVSLGFWSLLFSHITFCLPFVVVTVYSRLKDFDVKMLEAARDLGASELTILRKIILPLAMPAVMAGWLLSFTLSMDDVVVSSFVTGPSYEILPLKIYSMVKVGVSPEVNALAAILLALSLVLVLISQFVMRDRTGKS

SEQ ID NO: 6955 - protein, 267 aa, Xenorhabdus sp.
VITGIVSWLMLFVFLPNLMIIGTSFLTRDDANLVQMVFSLDNYSRLFDPLYAEVLIHSLNMAVIATLCCLVIGYPFAFFLARMPKKLRPLMLFLLILPFWTNSLIRIYGLKMFLSTRGYMNDFLLWTGIIEKPLRLMYTPEAVVLGLVYILLPFMVMPLYSSIEKLDKPCLEAARDLGAGKLQTFIRIIIPLTMPGIVAGCLLVLLPAMGLFYVSDLMGGAKNLLIGNVIKSQFLNIRDWPFGAATSICLTLVMGIICGSTIVRLSC

SEQ ID NO: 6956 - protein, 367 aa, Xenorhabdus sp.
TSLIPLVELKSLSKGFDGKQVISQLDLTINDGEFLTILGPSGCGKTTVLRLIAGLEDADSGKILLEGLDITDIPAENRHVNTVFQSYALFPHMTVFENVAFGLRMQKTPEKEIAPRVEEALRMVQLEEFAQRKPAQLSGGQQQRVAIARAVVNKPKVLLLDESLSALDYKLRKQMQNELKALQRKLGITFIFVTHDQEEALVMSDRIVVMRDGRIEQDGSPREIYEEPKNLFVARFIGEINIFDAKVLHRIDDQRIRADVEGHECDIFTDLPVTAGQTLKVLLRPEDLRVEEINNGEQVSGLIGYVRERNYKGMTLDSVVEMENGKMVMVSEFFNEDDPDVDHSLNQKIAVTWVESWEVVLVDEEVA

SEQ ID NO: 6957 - protein, 419 aa, Xenorhabdus sp.
QIVIAILLGVITGWGFNHYLEASQAKEIASYINIITDVFLRLIKMIIGPLIFSTIVAGLMSIGGSSSVGRITIKAMIWFIVAGLISISIGTLIANLFQPGVGLNIAIPQHGNIDTSLNAGEFSLKNFISHIFPSSFVEAMANNEILQILIFSLFFGSALSYICRNSQKTSPIVTMIEDLGRIMFRITDYVMSLAPIAVFAAIASAITIEGMGLLYEYGELIALFYLGIFLLWCILLTVGFLFLGKDIFLLMQLIREPTILAFATASSESAYPKTMNALNCFGVPKKISSFVLPLGYSFNLDGSMMYQSFAILFIAQAYNIDLSITEQILIMLTLMVTSKGMAGVARASVVVIAATLPMFKLPEAGILLILAIDQLLDMGRTATNVVGNCIATSVIAKLEGKRSSSESEVQEKEFVGHDS

SEQ ID NO: 6958 - protein, 162 aa, Xenorhabdus sp.
MGPSNSGKSTLANAISKKYNLNVTHLDQLFHLPNTDWQERSADEFISLHDMAIKEESWVIDGNYARCLPQRLSRATEFILLDVSTLSSLLCYINRTSFQRKRYGGLEGNQDSIKWEMLHHITVVTPKNRKRYAAMFEKLAIPKIKLSSIKEMKEQFNKWELF

SEQ ID NO: 6959 - protein, 106 aa, Xenorhabdus sp.
MSTLLELTEENFDSVVSAKGVSVVRFWAPWCEPCRMVAPTFKQLSIDMKDKATFGEIDIEQFNTIAMKYGIRGIPTTYIYKDGKPVDSIVGVASLSQFKNMVARNL

SEQ ID NO: 6960 - protein, 396 aa, Xenorhabdus sp.
MAERYDNFVSDGKMDMIGRVFHRIPCKYVSVSYNPVSADSTHIREVLHLGSYNYSGLNGHQKIIESSINAIHQYGTTSSGVRLLNGTSDLHLEMEQRLAKFLGVEEVITFSSGFSANLAALSTLCREGDIVFSDMLNHQSIVDGLKLSGATTRIYQHASLKSLENKLSQTSFQARKFIITDGVFSMDGDLAPLPGIVDLARKYNAFVIVDDAHGTGHIGPNGRGSCAYFGITDQVDVITGSLSKGLPGVGGFIATNKKTGNIIRIAANPYIYSASLPPAVLASIISAIDILESSPQLTLELQAKAEYFRQKLRDAGFNILNSETAIVPLITGDEHCCFAMARMLHEKGIYVNPVTYPAVSKTRARIRINLSANLNNEELDYSIRTFIQIGQKLALI

SEQ ID NO: 6961 - protein, 401 aa, Xenorhabdus sp.
MGFAVMEISCKWVESVSHFSREDWEHCYDPENVITSYSLQLALERSELVESFYYLSLYRNEKLTAIISCFSMYYSLTDLASPKWQDWVATLRKIFPGFLKPRIFVVGSPIATCSHMLGISLPPDHPDYPRLLQAMELEIDRKVSELQIKLQCIKEFDGYVHQRLQQVLQSKFVVCRSPDTTYVYTDQVGGLEYINNMLKRYRNVLRRRKRKFDATGLRWIMVDDFSAYVDKLSSLYRNVLQRSHTKFECLTPEFFHAVNEELGDQAQVLLCLDDDCIVAFELFLKGKNLHPLYLGIDYSYCDASALYFNCLYRVIEEAQNQQYPYIELGQTSYDAKFSVGAISSKLYFYIKHSNALYNYLLYRFRKLIFPAPKIPEQRKVFKLNEDYLDALKSSGALKHVD

SEQ ID NO: 6962 - protein, 235 aa, Xenorhabdus sp.
VEHKETDYAALHSQLLAQGFNPAMNYPLAFVQLQGRSWEQHSQNLKANCRKVLNRIKSQFRQSGWRIVHYHEQTMELEGIYEQYLNTHHRASEYKREALPLSFFEQIQKKCQVVVSVLYDKQDQVRSFIFSGISESIINPFVFGRNYQEESEVNSYDILHMDLIQRFSHFQTKIIDLGITNYFVKQNLGACLIRNDIYMKFRNPLFNALFGRILAKKFDVTQPKERRVFKNDDKH

SEQ ID NO: 6963 - protein, 584 aa, Xenorhabdus sp.
VLQQRLKYVELSRFIIFISLIVLVYYLWQQPELLFYSWLLVTGGILLFVGLVFLHHHIQEQLQNHLTLVTLNTESLERIHRNFPALAPCPIHVADHFSEQDRALNLYGTASLGQLLFNLSTSLGDSKLAVWITRGCPISQLSQHQQAIKELAPQLDLRQKLYACARKPDRTGGGYYLEKFHDWATSTTFPYITVRLKRVGQMLTLLSLVCITCAVTRFAPGWIVIPPVAMNIIFLMLRGNQFKQALNRADLQSNALNSLSKIVRNINSGEYYAQTLRNISELLQNPSERPELALRKLSTIIHYSHLRFNALPYLVLQCTLLWDFHITLNLQGWHKQYAQHVPRWLEAISLFEALSAMANLSHENQSWHFPTMSDERKLHAKQAIHPLLPAQQAIANDILLIPGQVTIITGSNMSGKTTYMRTLGLNLKLAMAGGPVACSELIFHPCELFTIFSAADSLHQGLSYFMSEVLQIKELITRVEQSGLQPVYLLDELLKGTNERERNMAIIAILKKLCAQQAMGMITTHSTTLATDSDLQPISRNIYFEETIDDQSPDKIFFSYRLKEGISHQTNAIKLFRMLGVDLT

SEQ ID NO: 6964 - protein, 136 aa, Xenorhabdus sp.
VIAAYDRSEINRLNWGTLSSVFSFYPFPQAIKCLYRLLASTSATPKPEGNSCFLYNLSVDPEFSRQGIGSQLLEQEIIRARDRKYKMIELDVATTNQRAISLYRHHGFLVKQQIDNPRILNGFCFNSHLRMFFELQ

SEQ ID NO: 6965 - protein, 49 aa, Xenorhabdus sp.
VTNGKIGQCAFREGKVDQNVKVINNRVEVIMDRNTVSTSASQFSGIRSY

SEQ ID NO: 6966 - protein, 184 aa, Xenorhabdus sp.
VTIRQSIRYGRWVGIFTAIGIGVGISVHVIYTLIGIGALIHSTYWLMTAAKIIGGLYICYLGIQFIRSKPEKADFALSYEAPAQQQTLRRAFFIGFMTNATNPKATLFFLAVFTTVVSTTTPLSVQVFYGVWMCMVNAAWFILVSWLFSNSVIRLKFIQMGYWFERVIGIILIGFAIRLVFIST

SEQ ID NO: 6967 - protein, 1074 aa, Xenorhabdus sp.
MAKRTDIKSILILGAGPIVIGQACEFDYSGAQACKALREEGYRVILVNSNPATIMTDPEMADATYIEPIHWEVVRKIIEKERPDAVLPTMGGQTALNCALELERQGVLQEFGVTMIGATADAIDKAEDRQRFDKAMKKIGLDTARSGIAHTMEEALAVAEDVGFPCIIRPSFTMGGTGGGIAYNREEFEEICERGLDLSPTNELLIDESLIGWKEYEMEVVRDKSDNCIIVCSIENFDAMGIHTGDSITVAPAQTLTDKEYQIMRNASMAVLREIGVETGGSNVQFAVNPKNGRLIVIEMNPRVSRSSALASKATGFPIAKIAAKLAVGYTLDELMNDITGGLTPASFEPSIDYVVTKIPRFNFEKFAGSNDRLTTQMKSVGEVMAIGRTFQESLQKALRGLEVGATGFDPKVNLDDVQSLTKIRSELKDAGAERIWFVADAFRAGMSVDGIFNLTNIDRWFLVQIEELVRLEDMVAEQGINGLTSGFLRQLKRKGFADARLAKLAGVSEKEIRKLRHDYGLYPVYKRVDTCAAEFSTDTAYMYSTYEDECEANPNNDKPKIMVLGGGPNRIGQGIEFDYCCVHAALALREDGYETIMVNCNPETVSTDYDTSDRLYFEPVTLEDVLEIVRVEQPKGVIVQYGGQTPLKLARELEAAGVPIIGTSPDAIDRAEDRERFQQAVNRLGLKQPANATVTTIEQAIEKGNNLGYPLVVRPSYVLGGRAMEIVYDETDLRRYFQTAVSVSNDAPVLLDRFLDDAVEVDVDAICDGERVLIGGIMEHIEQAGVHSGDSACSLPAYTLSKEIQDVMRNQVEKLAFELRVRGLMNVQFAVKNNEVYLIEVNPRAARTVPFVSKATGMPLAKVAARVMAGQSLQSQGVTKEIIPPYYSVKEVVLPFNKFPGVDPILGPEMRSTGEVMGVGRTFAEAFSKAMLGSNSIMGKKGRALLSVREGDKERVVDLAAQLVKQGFELDATHGTAVVLGEAGINPRLVNKVHEGRPHIQDRIKNGEYDYIVNTTAGRQAIEDSKLLRRSALQYKVHYDTTLNGGFATTMALSADPTEQVISVQEMHAKITK

SEQ ID NO: 6968 - protein, 386 aa, Xenorhabdus sp.
LIKSAILVLEDGTQFHGRAIGAEGVAVGEVVFNTSMTGYQEILTDPSYSRQIVTLTYPHIGNVGINSADEESPAIQAQGLVIRDLPLITSNYRSENNLSDYLKNHNIVAIADIDTRKLTRLLREKGAQNGCIIAGNEADVQVALEKAKAFPGLKGMDLAKEVTTAQSYQWLQGSWTLTEGLPEARKEQELPYHIVAYDFGVKRNILRMLVDRGCRVTVVPAQTPADEVLKMAPDGIFLSNGPGDPEPCDYAIEAIKTFLNTEIPVFGICLGHQLLALASGAKTVKMKFGHHGGNHPVKDLDRNVVMITAQNHGFAVDENSLPANLRVTHKSLFDGTLQGIHRTDKPAFSFQGHPEASPGPHEAASLFDHFIALIEQHRLQNAQNTK

SEQ ID NO: 6969 - protein, 273 aa, Xenorhabdus sp.
MADTDIRIAIVGASGRMGRNLIQAVQQADGVTLGAALVRSGSSLVGADAGELAGTGTNGITIHDNLHSVIDDFDVLIDFTLPEGTLTYLAICHQHRKAVIIGTTGFDDAGKQAIHDASRDIPIVFAANFSVGVNLVLKLLEKAATVMGEHTDIEIIEAHHRHKVDAPSGTALAMGESIAHTLGRDLKTCAVYAREGYTGERDPKSIGFATIRAGDIVGEHTAIFADIGERVEITHKASSRMTFANGAVKAATWITNKNSGLYDMKDVLNLENL

SEQ ID NO: 6970 - protein, 291 aa, Xenorhabdus sp.
MQKSDGLQSIEKPLALLPHTIRSLILERLRSLTQYEPVIGIMGKTGVGKSSLCNALFEGEVTPVSNVEPCTRDVLRFRLSNGNHSLMIVDLPGVGESEQRDDEYSALYRRILPELDLVLWVIKADDRALSVDGHFYRQVMLTYQHRVLFVVNQADKAEPCHEWNIIDRISSHEQQQTIEAKRNAIQQLFMPNYPVCIVSAGTGWGMEAMVEAMMGYLPDCATSPIATQLHRRLCTEQVKKQAKDSFGSVVGEVFDTIESSSFLPAPVRAVIRTVREAVVTVARSVWEWIFF

SEQ ID NO: 6971 - protein, 115 aa, Xenorhabdus sp.
MFGKGTVIKNYTSAYPIPIRLQSGDIVSISHSDIEYPYWVWTTDKSEISGWVPQQILRLTQVNQAICTENYIAHELTVKAGELLYLENLLNGWFWAHKECGETGWIPQDYITQEI

SEQ ID NO: 6972 - protein, 321 aa, Xenorhabdus sp.
MTFVPDYRDVSEAHSRIKNYIHKTPVFTSNTVNQIFDAEVYFKCENYQRMGAFKFRGAMNALSQFSDEQKKAGVIAFSSGNHAQAIALAAKMHNIPATIVMPHDAPKAKIEATKGYGGKIVFYDRYTEDNKAISRNLAEKHGLTLIPPYDHPHIIAGQGTVAKELFEEIGELDTLFVPLGGGGLLSGSALSASQLSPKCQVFGVEPEEGNDGQQSFRKGEIVYIDTPKTIADGAQTPHLGQHNFDIIRHLVTDILTASDKELVDAMYFLAERMKMVVEPTGCLGFAAARAIREQLQGKRIGIILSGGNIDMQRYSQLLANK

SEQ ID NO: 6973 - protein, 301 aa, Xenorhabdus sp.
MGFYSAGLAFRQAIKDESPLQVVGTINANHALLAKRAGYKAIYLSGGGVSAGSLGLPDLGISTLDDVLTDTRRITDVCDLPLLVDADIGFGSSAFNVARTVQSIIKAGAAGLHIEDQVGAKRCGHRPNKEIVSKEEMVDRIKAAVDARNDEHFVIMARTDALAVEGLNAALDRAEAYREAGADMLFPEAITELLMYKTFAEKTQIPVLANITEFGATPLFTLEELKSADVSIALYPLSAFRAMNKAAEQVYTALRRDGTQKSVLNMMQTRNELYESINYYDFEQRLDALFSQKNNRGDTHE

SEQ ID NO: 6974 - protein, 382 aa, Xenorhabdus sp.
MNEQIIGIKPKKSVALSGVTAGNTALCTVGKNGKELHYRGYDIFDLASQCEFEEVAYLLVHEKLPSRAELTAYKAKLKALRGLPSSVKSALEALPAVAHPMDVMRTGVSVLGCTLPEKEDHNPAGARDIADRLLASLSSILLYWYHYSYNGRRIDVETDDDSIGGHFLHLLHGQKPRASWEKAMHTSLILYAEHEFNASTFTSRVIAGTNSDIYSAIIGGIGALRGSKHGGANEASFDIQQRYDTPDEAETDILRRLERKEVIIGFGHPVYTISDPRHKVIKEVAQTLSEEAGTLQMFNIADRIESVMRDEKKMFPNLDWFAAVSYHMLGVPTAMFTPLFVIARTSGWAAHIIEQRIDNKIIRPTANYTGPENLPFVPIEKR

SEQ ID NO: 6975 - protein, 487 aa, Xenorhabdus sp.
MPDSTLTSAVNNRPEYDQVIVDIVDYVMDYIIVSPIAYVTAQHTFLDALGCGLEALEYPACTKLLGPIVPGTAVPNGVRVPGTQFELDPVQAAFNIGTLIRWLDFNDTWLAAEWGHPSDNLGGILAVADWLSRNAVARGEEPLTMWDVFAAMIKAYEIQGCLALENSFNKVGLDHVVLVKVASTAVVAQMMGLDREQILSAVSLAWVDGQSLRTYRHSPNTGSRKSWAAGDATSRAVRLALMAKQGEMGYPSVLTAKNWGFYDVLFRGESFQFQRPYGSYVMENILFKVSFPAEFHAQTAVEAAMQLHHQLKAQGKTVEDIAQITIRTHQACIRIIDKKGPLHNPADRDHCIQYMVAIPLLFGRLTAADYEDDVARDPRIDILREKIICVEDANFTQDYHDPEKRSIANALTMTFNDGNQLDEVIIEFPIGHRRRRADGVPALLEKFRTNLARRFTEEQQQKILSVSLELNDIKDIPVNEYLDLYSI

SEQ ID NO: 6976 - protein, 629 aa, Xenorhabdus sp.
MSFQDFYRRSIDDPSGFWAEQARRIHWQHPFEQTLDHSDPPFARWFCGGKTNLCYNASDRWLESQPDAKALIAVSTETNTEQVFTYRELYQEVNQAAAIMLSLGVKKGDRVVVYMPMVAEALFILLACARIGAIHSVVFGGFAAHSLATRLDNAEPVLVVSADAGSRGGKIIPYKPLLDEAIELAAHTPRHVLMINRGLSEINWVKNRDLDFATLRQAHLGTEVPVAWLESNEVSCVLYTSGTTGTPKGVQRDVGGYAVALATSMDIIFGGKPGGTFFCTSDIGWIVGHSYIVYAPLIAGMATVMYEGLPIRPDAGIWWRIVEKYHVTRMFSAPTAIRVLKKYPTDNIAQYDISSLETLYLAGEPLDEHTARWITETINVPVIDNYWQTETGWPIMAIARALDDRPGRFGSTSFPMYGFNVKLINELTGQECGDNEKGMVVIKGPLPPGCIQTIYGDNHRFVNTYWKHFDQQVYSTFDWGIRDSEGYYFILGRSDDVINVSGHRLGTREIEECIASHEDVAEVAVIGIKDDVKGQAAVSFVVLKEGKEIQSADHFATLEKSLMDLVDKKIGSVGRPARIYFVTQLPKTRSGKMLHRTMQAICEGRDPSDIALIENPASLDVIRDAVSHH

SEQ ID NO: 6977 - protein, 157 aa, Xenorhabdus sp.
VGDEIVRLTDENKTITDKVSELWRRINLLRVAQLSGEAALTLTTGIPIGSLGKTVCKLAGWFTSDDKLSNESSDTDSLELSTSGLLKPSEPFSMPAHIQAFRDTLESILEELKITLGRVDVCSKGIGWHDNLVSYFRQKTRYPNYHATTYVIRSCVG

SEQ ID NO: 6978 - protein, 408 aa, Xenorhabdus sp.
MSAGDARAQTLRLIRDNVIGGALFRALAARFQEVMVDEGQDCNPLDLQILTWLRAHGVNVTFVCDPDQAIYEFHNGNPQGIQILKDTYPIASHKELTGNFRSSPAICQLAATLRREGQVDRSLGESENVDYPILLLTYGGRGPTEIIGQAFLGRITELGLESTKAIILAHSGKVAMRAAGVTSSNSTGNSRIELLARKVSEFWSPAATPRTKENVVQSVEILLLDLMGVRQPNEHLIKAIERLGMDRRAHRRCALSFLINLPKTCRDSDEERLAWIACVHAEMEKLHLPLPAGVSVRRFFRQPPNAQWSKHLQVPAALGFACGNIHEVKGREYDAVCVVVPPNRAPENRIEALFESWEARVDAEAKRVLYVGLTRARNFVALAIPNAFAGRCVDLLATGQVPYTRVDL

SEQ ID NO: 6979 - protein, 421 aa, Xenorhabdus sp.
MALLRNFLPKEREQDFLAGVRRADNRPEILTTINTDISTALGLLTNGVRPQIAALDFGSETLLDVARDLRFRMADTGLIPEDIRSSGLGYSNLLYMATVVVELTKAKEADLTIFLVEEPEAHLHPQLQVLVLEFLLDQARQSASRIIEPGKPEGRIQIVVTTHSPNLTAWVSPRHLVVMRSRHREQDGIAISESVSVPIAEIGLKPKTLDKISRYLDVTRSALLFGNRAILVEGIAEALLLPVLAQKLVLAADLDGWLRFKGAVIVPIEGVDFRPYVEVLLRPYGDARIADRLIVITDANPTVLGNRKVDLENLAATHGAPDALIVLTNQHTLEHEIFGAGNESFLKSVFLRLHRNSRRDWEAQIEGIPEQDRPNAFLKLIEAKKTRKGDLAQAMASRIEAGEPFVVPPYLIDAIRGASHI

SEQ ID NO: 6980 - protein, 181 aa, Xenorhabdus sp.
MIDILVGIRVEDIMNDFGKLSKDINNPVSLWSDGIFKKYITYIPEDDRLASVNSSGNLVIKCDAGDMLRVKVMTLNMNLDYSVALIKLDSMMNVMPDDMMTMIEPHKVVQGIEYIPVVDVKNPLDVNMQAIRNYYWMSKINMMPANGTMRTMYYECIVGIYKEGILQGYVAAEPALILDKR

SEQ ID NO: 6981 - protein, 566 aa, Xenorhabdus sp.
MPIHASERNSNKTVIWTVSISRLFDLFRDITPEFDHQADITPIHLGFEQAVQHIRKRLENEHCDAVICAGSNGAYLKSRLSVPVIIAKASGFDFMQALARARQISSRIGVISYQNTLPALEEFQQRFHLRIEQRSYATAEDARTQVNALKADGIQVIVGTGLITDLAYEAGLVGVFVYSADSIRQAFHDALDMAKMARLNQAVISPYPTEDKLRIRHTINDIRGNSAAMEHVRSTITLYARSTATVLIQGESGTGKELVAQAIHHEYTLRYGQLKRKHSRPFVAVNCGAIAESLLEAELFGYEEGAFTGSRRGGRAGLFEVAHRGTLFLDEIGEMPLPLQTRLLRVLEEKSVVRVGGYRPIAVDVRIICATHVDLDQWVREGRFRVDLFYRLNVLRINLPALRERENDISMLAQEYFRRACAALNLRVSPLRTRELSQCDEVLRSYHWPGNVRELRNLMERIALYTSANPEQILTPALILSLSPERQVEIGIMNNMQGVKTASHSFTEKSPLEHDISLSDIVAHFSGNRQAAAEYLGISRTTLWRRLKQEQQKNLKNPAPNRGQDL

SEQ ID NO: 6982 - protein, 209 aa, Xenorhabdus sp.
MYTLWIANKNYSSWSLRPWILLKALNIPFNEQLSYFEDGKSSHEKFKAFSPTGLVPCLVDGDITVWDTLAITEYVAEEHAQVWPEDRTARAWARSAAAEMHSGFTALRQICAMNCTKTIALAEISSELQSDLSRLDELWSEGLSRFGGEWLAGNSFTAVDAFFAPVAFRARTYGLKFSPASQAWIDRILKHPAMVEWLEAAQKEPEIAH

SEQ ID NO: 6983 - protein, 132 aa, Xenorhabdus sp.
LAAETHPQWHTLGGIAVVESWREEQGKTESYERRYYITSHRGASAEFLACAIRSHWHIENKLHWQLDVSFGEDSRRLRSGHAAENVALMNKIALNLLKNEKSVKIGVKTKRQKAGWDNGYMMKILTVGFSSV

SEQ ID NO: 6984 - protein, 291 aa, Xenorhabdus sp.
LVEIFCDVDDFCRLFIPQWAQFCLDNGYRLRRRQGRMYPSEIMTVLILFQRSHYRDFKNFYLEHIWQYHHRDFPSLLSYTRFISVAPSVFVPLSSYLTQLKGKPTGIAFIDSTSLRVCHNIRIPRHKVFQGIAQRGKTSMGWFYGFKLHLIINHLGEILALKVTPGNVDDREPVRELSKDLTGSLYGDKGYLSQELADDLAKTDITFITKKRRNMKALALAEWDKVMLKKRFIIETINGQLKIGSQLEHSRHRSITGFLLTILTGLIAYYLKEKKPSLKIFYSEEDISAIA

SEQ ID NO: 6985 - protein, 306 aa, Xenorhabdus sp.
LLPALVSILKTLNLTESAKQLNVTQSAMSKTLNQLREDFHDRIIVREANQFILTKKGEKLKAQLPALLQQLNNLYAPELMEPSLCDRKFTLASSDYVAQAILASILSHIEKEAPNVSIEYKQWHKDNLYNVAEQDVDLVATIADSVPDNLYGNLMAEDPLVVVFRNDHPHFDNNMTVSNYINGRHILISGGGDKNSPIDQQLAMMNLKRHIFATVPFFQSAIELLLKTDTMLTMPLHIASDFSQRYDLKIKTLPIDIKPQQYYLLWHAKHHEDPEHKWFRELCLSLIKNHLERTIKYGMKLIHTHK

SEQ ID NO: 6986 - protein, 368 aa, Xenorhabdus sp.
VLSAQQKASLRMISSRAEISSSHFSVHYNYSDLKADPDKLMVQYFDIGLYYANWGQVIFYLKVPLDTIPPVFMHIDDGDSVTCENVNGYVLFTFSVGENDYYMDDEDASDYLNHLVELRSELLRGDYRLLYLPWLKLAFDNDETLSELPLINFDFNQLSDAQLAFAELFDIPPAAYKALDMLLKSSPAHPAEVKQLTTEEQINQLSDADKDLLLKSLFDKGQLTAHQARALVCKPSTSNDYQYWLSPSSLHTYWQAANEEMERERLLAEERKREQERLATLKRLNAVFAAKEIHWKNAKTYSEQGHASAYDKAAREIKDLYAAYQINNALAEFVTIYQVFAKGIERRRTLVQRLGLLNQEINKYQGSM

SEQ ID NO: 6987 - protein, 482 aa, Xenorhabdus sp.
VNNHYDVLIMGAGVSGIGMACHLARECPDKKVWILERRRTIGGTWDLFRYPGIRTDSDMMSYGYKFSPWTETSIFADGPSIKRYLRSAMEEYKIDKKIQFGIKIILINWSNKSRQWEISAIDEASGETRQFTCNFLIGATGYFNHDEPHSPKLPGLEDFKGPVVHPQHWPETLDYKRKRVVVIGSGATAVTLLPAMANDTEHITMLQRSPSYIFSIPGRDKFAEFFKGIIPQRWIYALSRERNILFFSYLYKISRYFPNMLRAFLLGLAQRKVGPDFDMKNLTPEYMPWDERLCFVPDSNFFKVIREGKASIVTDHIKHITENGILLQSGKELPADIIVTATGLQLQLMGGVGVSIDGQPIDTSNIMFYKGTLIRDIPNFAYLFGYINNAWTLKIDLSADYICRLFHEMDRRQATVVTPHAQPDEILVDENIFGALKSSYVKRSGDALPRQGRSENWRVSHDYQKDKQVLRQPVDDPALEWT

SEQ ID NO: 6988 - protein, 321 aa, Xenorhabdus sp.
MATYQMVGVIVSDIETITPTIKRFTLIPDQNTHLPSFTAGSHIFVQMQDGSSNYSNAYSLLNSPFDEQRYQIAIKREARSRGGSAFMHEKVTIGDKLFVSEPNNLFSIVPEAKKHILIAGGIGITPFMSHLHQLEQQNADYELHYCYRNANENAFWQELMASEFKDKVVCHVSSEGSRMELETFIAQLPEGSHIYTCGSNSLSEGVKQAAQKAGFPQYQLHFEQFAVEDKTGDAFTLVLARSGIELEVDNASTILQVIERNNAAVVESLCREGICGTCETAILEGEADHRDHYFSDEERESQTSLLICCSRAKGKRLVIDL

SEQ ID NO: 6989 - protein, 483 aa, Xenorhabdus sp.
LVLVALMFVLYLALSKYGNIRLGEGKPKYATAPWLCMFICAGLGSSTLYWGVMEWAYYYKTPGLNIAPHTPKALEYSISYSFFHWGVSAWATYALASLVMAYHFHVRKNKGLSLSGIISAIIKINPQGFWGRLVDMTFLIATVGALTISLVVTASTLSGGLSVLTGIPNNFMVQAGITLLAALIFSLSSYIGIDNGMRRLSQMVGWGALGFAFLVLMAGPTEFIINNIIHTIGLTTQNFLQMSLFTDPMGDGQFTRSWTVFYWLWWISYTPGVAMFVTRVSHGRKIKEVIWALLLGSTFGCWFFFGVLESYAMHQFITGAINVPEILNTFGGETAVHQLLNALPFGQFFLIAYLCIMIIFLASHMDAVAYTMAATSTRNLSEGQDPSRNLRLFWCVVITLIPLSILFTQASLETMKTTVVLTALPFLVILLFKVYGFIRWIKQDYAHVPAHLIDTSEPQENVVIPVPIKVKNTNNTFIHDSNN

SEQ ID NO: 6990 - protein, 361 aa, Xenorhabdus sp.
MKKTFKIAAIPGDGIGHEVLPEGIRVLQAVAEKWDLHLSFEYFEWASCDYYLRHGKMMPDDWFNQLMQFDAIYFGAVGWPETVPDHISLWGSLLKFRRDFQQYVNLRPVRLLPGVPCPLANKKPEDIDFYVVRENTEGEYSAIGGRFNEGTEHEVVIQESVFTRRGVDRILKYAFELAQSRPRKLLTSATKSNGLSISMPYWDERVEKMAKQYPDIKWDKQHIDILCARFVLNPERFDVVVASNLFGDILSDLGPACTGTIGISPSANLNPERNFPSLFEPVHGSAPDIYGKNIANPIAMIWAGAMMLQFLGEGEQRYQDAHDDILAAIEAVIVQGIVTPDMKGKASTQQVGEAIVNHLNA

SEQ ID NO: 6991 - protein, 89 aa, Xenorhabdus sp.
VKNARVELKTSTELKETLRQAAQVAGVDLSAFILSAAFERAEEVLENQKRRELDEENWRTLNMLIAEPASPTLALRALMRKNKDGKATK

SEQ ID NO: 6992 - protein, 308 aa, Xenorhabdus sp.
MSSPLLRKENRIRTIQASLAIEHNSLSIEQVTAIMNGKRVLAPAKDIQEVHNAILAYEKLPDWRSHRLSDLLAAHRLLMMGLIDFPGQLRGNDVGIYRENKLIHMAPPASQISRLINELLTWLKQTDIHPLIASSIFHYEFEFIHPFADGNGRMGRLWQTLILSEWRSELAWLPVETIIHYQQQAYYQVLRECDQASDCTVFIDFILEKLAEALKESIDTEQQDTILESEEMSVQMSVQMSEENTQQLNATAKKILSIIVNHPAITISQLADDLGVTPRTIERNIKVLQDFGYLIRVGAKKGGYWRVR

SEQ ID NO: 6993 - protein, 196 aa, Xenorhabdus sp.
LKIIKEKKMFRERIITQAHQWITERAYILDTETTGLDKQAQVVEIAVTDIDGKVIFQRYLRPSVLIDPEAQAVHGITLSALSNEPQWPQIADELIPLLTSRPLIIFNEKFDLRLIAQTAKAFAMDTRWIKQLQSQCAMGLAAQFYGATNRYGTISLANAARAAGVSVKGKAHTAVVDCQTTAAVVRSIADLYSQLK

SEQ ID NO: 6994 - protein, 98 aa, Xenorhabdus sp.
MKLKKLKKELDALKLMEKDPDVVGYVLFNKRNRRFVTLDENEFGMVMYADDIEEAYLAPSRFVALMDIDFLPEPDKFDTAAVPVVDNPLFGLMLKDPI

SEQ ID NO: 6995 - protein, 266 aa, Xenorhabdus sp.
VLIKNSEEIKRMEIAGRMTGQVLEAVRQIIIPGVTTLEIDTFCHNYIVNTLGAIPGSLGQYGFPYTVNTSVNHVVCHGWPSDKKLKDGDIVNVDVTVKKDGYYGDSSVTFCVGEVPSHAKRLVDITQECLYKAIRIVKPGITLGDIGQTIQQHAEANNYSVVREYCGHGIGSSMHEEPQVLHYGSAGEGIVLEEGMTFTIEPMINQGKKEVKLHKDGWTVTTKDRRLSAQFEHTILVTHDGFRVLTLRDEEWEMFERIELPSFVLY

SEQ ID NO: 6996 - protein, 492 aa, Xenorhabdus sp.
GYQLKLIYVFSAFAFFLFLASSNKRLYVVLISLFSIVGILYAPLGLNYGFPDINAVGSVLYTNRNETLEYISGFPVSTYLTVFAIFILMLCSVKLNAVFSAKGKKWLLALFFISAFWSPVKGYVKSGFVDSYELLNTSLPEIRFFKDAYQSYVKVMSENNRFASVIKYQDDWQPTVKEDKYDTYIMVIGESVRRDFLGEYGFPDNNTPWLDKTNATIFTNYISAAPSTQLSLTNSLAIRQENQIKLNNSIMTLANKAGFETHWISNQGMKGGFDSPSALIGQQATHSIFLKEGSSDDRSYMPDENLLPHIRNALKQGHKKKLIAIHLMGSHPQPCARTNNKYSHYFHSKDISCYVQSIHNTDSLLAEIENIARHNQLNWTMLYFADHGLSFVRKGTDKENLNHSDANKQNYQVPFVITGYDYNVKTRIDAHRSGFHLLPMLSTWLGIEEPRLSSECDWFSEQQCDDQHTVISFDGKYADFNSLKDDAIDFGL

SEQ ID NO: 6997 - protein, 720 aa, Xenorhabdus sp.
GCFMNNNKFLKHIPWMILGIIGAFCLGVVALRRGEHVSALWIVVASVAVYLVAYRYYSLYIATKVMKLDATRATPAVVNNDGLNYVPTNKNVLFGHHFAAIAGAGPLVGPVLAAQVGYLPGTLWLLAGVVLAGAVQDFMVLFMSSRRNGTSLGEIVKEELGRVPGTIALFGCFLIMIIILAVLALIVVKALAESPWGVFTVCSTVPIALFMGIYMRYIRPGRVGEVSVIGILLLIAAIWFGGVVAADSYWGPALTFKDTTITYALIGYAFISALLPVWLILAPRDYLATFLKIGVIVGLAVGIVILNPDLKMPAVTQFVDGTGPVWKGTLFPFLFITIACGAVSGFHALISSGTTPKLLANEKDARFIGYGAMLMESFVAIMALVAASIIEPGLYFAMNTPPSALGITMPDLHNLGTSEAPVIMAALQDVTTQAAATVSSWGFVISPDQILQTAKDIGEPSVLNRAGGAPTLAVGIAHVFHQIIPAADMGFWYHFGILFEALFILTALDAGTRSGRFMLQDLLGNFVPSLKKTDSLIASIIGTAGCVGMWGYLLYQGVVDPLGGVKSLWPLFGISNQMLAAVALVLGTVVLIKMKRTKYIWVTVVPAIWLLICTTWALGLKLFSDNPKLEGFLFLAKEYKQRIVEGGADLTAQQINDMTHIVVNNYTNAGLSILFLIVVYSIIIYGIKTAINANKNPERTDKETPYVPVPEGGVKVSSTH

SEQ ID NO: 6998 - protein, 67 aa, Xenorhabdus sp.
MFGNLGRAGKYLGQAARMLVGVPDYDTYVQHMKDNHPDQPYMTYEEFFRERQNARYGGDGKGGMRCC

SEQ ID NO: 6999 - protein, 283 aa, Xenorhabdus sp.
VIENEFGEVPIDNELIGDRATQIKTLSNGCICCSRSNELEDTLLDLLDGIDNGQFVFDRLIIECTGMADPGPITQTFFSHEVLCQRFLLDGIITLVDAVHAEQQLDNFSIAQSQVGYADRLLLTKTDVAPENDALIGRLQKINARAPIHKIVHGKADLDLLFDLEGFILNDQLTVAQPVFRFIPQHQNSVQSIVVTLNHSVELTKVSNLMEELLLSFADNLLRYKGILAIQGESRRLLFQGVQRLYSADWDREWRDDEHRQSVLVFIGVDLPEQKIREKFAQL

SEQ ID NO: 7000 - protein, 223 aa, Xenorhabdus sp.
MKSKLTLASVCLASLMLAGCATESSSTLQVQKVSSYNTIYKGIRSPIAVGKFENRSSYQNGIFSDGIDRLGNQSKTILVTDLQQTGRFNVLERTNMAELQTEAGLQGKAQKLKGASYVITGAVTEFGRKEVGDHQLWGILGRGKSQIAYAKVMLNVVNVETSEVVFSSAGAGEYKLSNREIIGFGGTSGYDSTLNGKVLDLAIREAVNDLVSGIESGAWKPTN

SEQ ID NO: 7001 - protein, 104 aa, Xenorhabdus sp.
VLVGCVQAPKTIYEWGDYQSTLYQYYQQDKTGPLEQIQALEKVIEQAKAKDKPVPPGLHAQMGLLYSKTGNIENAFQQFEIEKRLFPESAPYMDFLLSKNKGVK

SEQ ID NO: 7002 - protein, 179 aa, Xenorhabdus sp.
VNKSVHVKAAGSVISQVTYPLAESGYYVFPVAVVEETFRQNGVSEAQDISNISYKKLHDIFGADAALYLDITQYGTQYQIISSDTRVTAEARLVDLRTGEKIWGGIATASSAENRNNGGGGIIGMLVSAAIEQIVNTVADRGHEIAGITSNRLLSAGQYWNGHLLYGPRSEFYRKEKTE

SEQ ID NO: 7003 - protein, 448 aa, Xenorhabdus sp.
MSGMQAPTQCKLDRYFKITERGSSVRQEILAGLTIFLAMVYSVIVVPGMLGQAGFPHTAVFISVCLVTGIGSLLMGLWVNLPMAIGCAISLTAFTAFSLVLGQQVSIPVALGAVFLMGCIFTFISVTGIRAWLLRNIPMGIAHGAGIGIGLFLLLIAANGVGLVIKNPKEGLPVAFGTLTAFPVFMTLLGLAAIIGLEKKKVPGSILLVIIAISIIGLIFDPAVKYQGFFKVPTLGEDGLSLMFSMDIMGALQPAVLPSLLALVMTAVFDATGTIRAVAGQANLLDKRGQIISGSKALTADSVSSIFAGAIGSSPAGVYIESAAGSAVGGKTGLTATIVGILFLLILFLSPLSYLVPAYATAPALMYVGLLMLSNVRKLNFDDSVDAVSGLLCAVFIVLTCNIVTGIMLGFSTLVVGRIFAGEWRKLNISTVVIATALVVFYASSWAI

SEQ ID NO: 7004 - protein, 243 aa, Xenorhabdus sp.
KVIPFRVPLPIVQIAMGALLAWPHFGLHVTFDPELFLVLLIPPLLFVDGWKTPTREFFHHGREIVILVLVLVLVTVVGIGYLIYWLLPSIPLIAAFALAAVLSPTDAVALSSIVGKGRIPKNMMSVLEGEALMNDASGLVALKFAVAIAMGTMAFTVTGATFEFFKVAIGGLASGVAVTWLYSKSLRLMSRWSGDDPATQIMFMMLLPFASYMIAEHIGVSGILAAVAAGMTISTAGVIRNAP

SEQ ID NO: 7005 - protein, 195 aa, Xenorhabdus sp.
LKITLTETKPAIWRRFIVPSNISLDRLHDVIQVVMGWEDSHLHEFIFDSKRFTERPETPEEGHEEGKFKLDSLIKRKGSKFIYLYDFGDSWEHEILLENSNYSPEELPMPIFCLEGEQACPPEDCGGVYGYRDLLNILNDPAHEEYQDMFEWIHGETEISPGDAFLPEKFYPEEVNNMLALYYRWSRDRYLSLFG

SEQ ID NO: 7006 - protein, 417 aa, Xenorhabdus sp.
MNRHDVIKTESPLTDHENKYIHNKKYDICVVGGGIIGLCTAYYAAKSGKNILLIERNTIGTQDSSSAGHVRMWRTVYDDLEHAKLSFKAGDMYHDLEKELDSKFIYMNGLLNFGIATGDTPEGTLFGPVKVLKKLNKKYEIITKDELESKYPFKNLPDNYIGLYSPDNATIDVKNIIKKLGQYLKESNNVTVTEETKVCKITSRQDGVSIITNNGSYKSDKIVITSNAFTNQILPNSVGIRINYIIWDMCFSYYKLTGEIPEKNYPMFFQFDNPKNGYSNLFYGFPSYDFARKGFIRLAVDWASHKFYDVDKRCFAPKELDIDITRDFANKYMRGVDTTPIDMARALHTDLPDNTAVLDFIPQQYDQYKNIILSLGGWSFKFAPLFGKACADLALKGSTSFNIYPFRIDRKNIIQPA

SEQ ID NO: 7007 - protein, 577 aa, Xenorhabdus sp.
MDQIPHSTGTQDELSIDIAIVGAGVSGLYTGYRLLSGDYSDNAYSPKSVHIFDLNHMIGGRLLSVNLPGMDIIGELGGMRYLTSQKITTSLIENIFKLDYGPFPESDSPNNFFYLRGQRFRADTWSEMQKKDKKFKIRYFLNDDIQGYSASQLFNKIIYDVLVADPWFKENYGNLVEKTSKYDYKFKISLRQWDIIKKDITYIKKGSPYDKMKVKDIGFWNLIKDQVGQEGYNFLSDAGGYYSNTINWNAAESMSYMVGDFTQTDIEYRTIKNGYDQLAYALAKAYTDQNGAKLWLKNTLITFQHNNGGNRRYSLRFRNENSQTDWTVHTDTIILAMPKQSLSLLDQYNFFFDKHSHPKLNKNINTVIPEPSLKLLMGFEYPWWNKQFNTKSGASITDLAIRQCYYFGTDDKNSHSLFLSSYNDMRAVTFWKALIQIKDKNSIYEPCETHIVSKEKLKESPLPGEPVSKHLVEEAMNQVKELHGIDIPPPYIARIQDWSKDPYGGGYHAWKVGVSVDEVMPFMRHPIKNESVHIIGEAYSGDQGWTEGAFCVTEKLLQEIFRLNWPEWLDKEYYLGR

SEQ ID NO: 7008 - protein, 187 aa, Xenorhabdus sp.
MKQRKFLTRYEIDAILAETKQGRHAERDYCMLLMCFIHGFRVSELCNLCLSDLDLNSAIIHIRRLKGGLSTTHPLIPEEIEALKKWLDVRQKWREADSPWVFLSQKSGAVSRQQVYGLLKRYGKQAAVSVSPHPHMLRHACGYALADLGRDTRLIQDYLGHRNISHTVIYTASNVKRFSNIWETHSK

SEQ ID NO: 7009 - protein, 431 aa, Xenorhabdus sp.
MSHVSSAAKRANMKEAEWKQAIKFNGTDMGWVIMSIGMAIGAGIVFLPVQVGLMGLWVFLLSSVIGYPAMYLFQRLFINTLAESPECKDYPSIIGGYLGKNWGVLLGVLYFIMLVIWMFVYSTAITNDSASYLQTFGVTDNLLSENPSYGLALICILVMISSRSEQLLFKVSSLMVTVKLVVVAALGLSMIGMWHLYNIGALPPFSMLIKKAIITLPFTLTSILFIQTLSPMVISYRSHESNREVARYKALRAMNIAFAILFCTVFFYAVSFTLALGHDEAIKAYEQNISALAIAAQFFPGGWVIFVSVMLNVFAVMTAFFGVYLGFREASQGIAMNLLGRLMPAAKINEKWVQKGIVVFAILLAWGAIILNAPVLSFTSICSPIFGIVGCLIPAYLVYKVPSLHHYKGISLVLIIFTGILLCISPFLAFS

SEQ ID NO: 7010 - protein, 437 aa, Xenorhabdus sp.
SLFSLSWPIFIDIFLHMATLLINTYMVSHISSAYLAAMGVGNHVFDLFITIFNFISVGCSVVIAQYLGSGRRDKASQAIHISIAFNFVLGFGCALVTIFFGYKILHIMNLPENLMDDGFAYLHILGICLIPEAISIILAACLRVYGKSKSAMYVTLIANLLTIVGNMIVLYGFFGLPKYGLEGVAWSTVFGRTVAVILLCGLLFYGLKIKLVPKLLICWSKNMLGKILHIGLPAAGENLVWILQYMTAQAFIGLMGETSLAAQTLYFQLSLFIMLFGIATSIGNEIMVGHLVGAKRFEEAYIRGIKSLKIGVIVTIGVVLSFWAFRQPLLGLMTEDQKIIELLLPLFLLSVFLEPGRTFNIVMVNALRASGDARFPLYTALIFMWGISIPVGYFLGITMGMGILGIWIGFFCDEWVRGLVNAWRWKSKKWQTKRLDV

SEQ ID NO: 7011 - protein, 1502 aa, Xenorhabdus sp.
MGLLEGAAVRAARMAAVRAGTASAKGGNGPKAARIGDPIQHSSFLAALAGVVAGALIAAAVIGAVGLLLGPIGGLLVGGYLVAKMAGTIASASAAVTRMCDSVCSPDGMLMSGSKNVKIEGKDAARAEVDKSGCSKHLKVLIAQGSETVFINSQAAAREGDKLVCGATIKGGASTVLIGSGQGTYIDVEEEFSPWQRALLVAVEFIVPPQRGLLKAGLKLMTKGGRKALFRLAVKEAKNTVRDAKAVVAGAKLAAKNAKAWAQKAAKNPKWAAQSAAKGAKAGAKVAASAAKNHVKQVAANAKNRVKQAGNRISNAGRSMKNGSAKVLNGTKKGATTAGKSVKNDLSERCQSARRGYNETQGAKRYLEATKRFFCKDPIDVTTGMLFDQRIDIELGQTIPLAFMRSWSPGERGLLGENWTDTFSGSAIVNGDQIAIRTTEGACLYFVLMPHEQRSRNPEHPAFILSREGAGFCLRERNNPVSQHFTVPVPTEEGGIQWQLGALKDVYGNQIQFHYSNENRLVSVTHSDGPELMLLYREDGKLEEIRRSDNEQDEVMVRYGYHDNGWLADADSTQHFHLFYEYNDQGLISRWSDGDQTAVEYQYDAQGRCIYTVGSGGYYPGRFEYEPGITRVIDPDGYVTAWHYNAEQLVTKEISPCGHITRYEYDNWGNLTRKILPEGQTFTLEYLADTGLVTAFTDAMGAMWEYDYDEQDRLVQVMAPSGQKWMQHYDDQGQPTRFVAPDGSETTLTRNEFGLVTAIEDSDGRKRTQEYDANHRLTALFDEENRNLILGYDRQDRLQHLKTGGGAQWSWEYDRHHRISLSHRPNNSRERLRHDRHGNLTTWTDARGVAWSLEYGPFDLPVARVDGEGHRWEYRYDKNSLQLIEVINPLGERYRYTLDADGRVITETDYSDTQWHYAYDGNGNCTEKRDALGQITRYRYDDNGKLTEMETPEGTTTWCYDPMGRLLEVAALGTIPLRFEYDEQGRLVKEYQAYGQISHEYPDAFTHQRNVLVQDGQEWQTEMGVNKAGELKRLRISDDHRLNIERDVEANECRRSSNKGFILHQEHTLMGQLTTQRAGRNTEFFEAHEVADIPQPTLAGLDREYRYDAALNLVAANDERECLRYVVSGNGQVTSVSEGERLREHYQYDASGYPARRFDGLNEIDGERLYQKGHRLRQLGQHLFEYDDAGRMTAMQLWQEGHRPQLTKFRWNSQNQLVGVQTPGGQQWDYRYDAFGRRTEKVCERAGMRTTYLWDGDVPAEIREYRHNRLYSIRHLVFDGWQLLAQQVQFFTLNPENRHELLAGEIQTQYAVCAPTGEPLALFDEAGHRVWRQPPQSLYGLRLGVLGENAELNPGLKFAGQWRDEESGLVYNRFRYYSPVASMYLTPDPLGLVGGKNPYAYVSNPTSWIDPLGLTSCPGSGVKDWAVDEYGKLRDLVKGKNLGLDAHHAGQKAIMKDLVKGYDPSTGPAILVPKSGHTIFKGDLGVVSRSTKNSKTGEKFTN

SEQ ID NO: 7012 - protein, 139 aa, Xenorhabdus sp.
MNAQAYPMKEGTLMIPADWRDESMHVFVLPDESGANLVINRTPVPEGVDHASFYEETLSQFVTHLPGYQEQGRSQMELSGELAWRLDYHWQSPEGEMHQIVVLQIRGDQLLAFNLTSTQPFNESRRNTLLQVVSSFNAV

SEQ ID NO: 7013 - protein, 689 aa, Xenorhabdus sp.
VQQGQQAAQMAKQAAGMLGGSGQSSGQSLPHTQGITGGQGTSGGQGLAKQAASGHNAAAKVLQQASALLGGGGSDPSGLQFTLTAGGLPPQTFVVTDFALNESFSQPFSLSVGLASADPAIDFPTVLDRTATLTILQDGVEQRSITGIVSRFEQGDTGLHQTTYQMSIRPDLWRTTLRQNSRIFQQLDIQAIITTILKEHGIRDVIFSLRHPHPEREFCVQYQESDFNFLQRLTAEEGIFYFFECGNGRNTLVFADDAGSVPPGIVLPYQPGGVSTIGEPAISSLTCSAQVRPAQVQLKDYTFKNPAWPAEFRAEMKEDTLQEMYYEHYDYPGRFKDETHGEAFTRYRLEALRNDAVMGQGSGNAIAIQPGRLFTLYNHPRPDLNQPWQVVGASHSGSQPQARETASGDTGTTLHSHFHFIRHNQSWRPTPLPKPVIDGPQIAKVVGPAGEEIFCDQYGRIRLQFPWDRYGRSDDQSSCWIRVTQPWAGQGWGMLAIPRIGQEVVVDFLHGDPDQPIVTGRTYHASNIPPGGLPGSKTQMAFRSKTHKGEGYNELLFEDAKGSELLALHAQKDMSTLVKDNQSLVVEKGNRTLTIQKGHEAKRVEEGNLSEEVCQTRSTEASSVVVVTEGTKGEEPGTQFYKATNAITLMVGSSQIQLDTEGIALAFNNNTILMNAEGVFINGTLITLN

SEQ ID NO: 7014 - protein, 409 aa, Xenorhabdus sp.
VESLSLTLFKTNGVDLQTAIYYTLARMHLNGLAGFTEGCELLAGVIVSEWDALWPSQPQVRTDLLEWFHTRTGSVLRQLDFAASDLRMIYRAERALQLIIDQLQQSDLKHLPRVENLLWFFQNAAKKLEKPRQAAKPAQQPVKMPPLVYLSKSECEPETPPPSPPPQPQPEIAPEESQQRVRVQFPEPPQRGLTAWQGFGIGAFLGLLVLVGSWLLFYKPLQQQLNAITEQPAGSRLAWLYQPTLANYAAQLDRLAETSPLATWDAARTLTATAEKQWPQLAEQVNATRNWQQQMTIRIDSVPLKGSWYSTRDQLQQLADKILLQERTRGSFTLSYLKTAIYDIQRNHGSEIPLEELLRQLNVHAEKGEAVSPVLMKEIDDRFNALLGRYDRLRHVTEQRDRATKHTNM

SEQ ID NO: 7015 - protein, 1160 aa, Xenorhabdus sp.
VLLIAVWWWGPDLKIREDYPLESLAARWLATALIIMGVLGWIGVKAWRRLRQLEKLNLDVELKVVDPVRMDIEYQDRYLDHWKSQLQRHLDSYNYLYERPWYMVIGSQMSGKTSLIKEGYKLSEIAAPEYLRQDGDISLLLRCWLGEKAVIIDPKGRLIDQPVPLNSDKPQINSRLWEALLNWLSENRQRQPLNGIILTVDTLRLMTDNREQRERYVREIHHRLQEIRLTFHSQLPIYLVMTKIDLLHGFEAMYQSLDRKLRDQILGVTFSLNNRDEKAWRSELEQFWQQWMNNLNGAMPDMMLNGVDANQRSALFSFTRQIQGLYSYIVQMLEDILYNDENHRPMLRGVYLTSAHQVGQMDDMFTQSASAQYHLGSQAFPTWPAGDTLPFFTQTLFEDVLLAEPNLAAENRIWLSRNRRQLYTFSTVSALVVLAMWGGWHYFYQKNYRAGEEVLAEAKKFLSVPAPTGDDNYGSLQLPLLNPIRDATLAYGNYHEKKSFLTDMGLYQGGLVGKKVENTYLNLLEQKFLPSLMHVLLDDLNKAPAGSEEKLEILRVMRMMEDKSKRNAGLVAQYMRERWSKAFYGQRDVQDALLSHLNYALDRTDWKEKRDAGDQEAIDSFAPFAKPIREAQLELSKLSVKQRVYQNLRIKAQDTLPAPINLRDQIGPSFDSVFVASNEKRLVVPQFLTRQGLTDYFIQQSGELVELTGMDSWVLNLAKNKGLYKESESAPRKDNYSEPDRERIEREITELYLADYTATWRAAMNNLEIRDFEDLPQAINAIEQVISGEQPIKRALQILSDNTNPPMLDSSLSNTERKALLDKQDYTLLTDISRGFAQETGVLIEHGDKGSTLQSVYQKLMALHRYLLSIQNSPTPGKSALQAVQMRLDKNNSDAIFEVQQMAKNLPEPLNRWVGELANQAWRVVMMEAVRSLEVEWQDTVVKQYNTYLAGRYPFNPNAKEEVPLSEFERFFRPDGTLDAFYKQSLKPFVEHKLTMGTDGRTLIRPDVLKQLENANRIRATFFSPQNGLGTQFAIEPVSLTGNKRRALLNLDGQLVDYTHGRSNVARLIWPNSMRAGTESKLTLMPDRSNQAPRSISYMGPWAQLRLINSGKLTNIQSGSFDVRFSVDGGEMTYRIYVDESDNPFAGGLFSHFKLPDTLY

SEQ ID NO: 7016 - protein, 493 aa, Xenorhabdus sp.
MDIRTQFDWFGSLLAPLSDEQTGKALGDNDPTWEFIDGEMIKFGSLSHGSLDVEEIQRQALQLFSETSKDFRLMVHLLRTLQHAGQPAELLLAMELLTEYVKNYWEKAWPNKPVLKRRLAQQVLKRFDSAQNSFTEKSSKVQRDDAQGVLAHLAQCWHSSEPELAKEIDQLRTRYNRQPEAGTAPSQPAVAATSQTTPEPQSSQGTTQENAAAPMPEVDVNSSSDKAWKQTLMTVSDLLCERYPESPVGYCLRRHAVWYTITTAPMAGATGKTPLAPASADRTADYLARLPTADNKLLVQIEQSLALAPYWLDGHAIAAQAAAQLGYKNVAQSIRHELNAFLERLPVLKTLSFSDMSPFISPETLDWLAPEPSSSTGGGSVSADQEAIWQCFQQQGLEAALKMLEEHQQQLTEPRDQFYGQLLNAQLLEEAGMTALAQQHYRNLLHTGQHMLLTQWEPSLLTQLAERIGVEKTGAEKIPSLDKDTASNRSVNL

SEQ ID NO: 7017 - protein, 218 aa, Xenorhabdus sp.
VSLAGSPTLAEIAEAQKTAASKPQEVVLQQEKQLDELQKCRFERSPLIRLACYDREFDNLKIGTVPVTLENMGPMWRQAMEQEMQRTDHSTGFIVSRGENGTTRIILTTPAVGVPPPRPVLMLSCIDRITRLQVALPKPAESGAVTVTTNKTLFKTEWFLRERGYLWESSRGLPGIDEIKRLMGSEHMTITPEQGSQITFNISQLEQAAKPLREACRW

SEQ ID NO: 7018 - protein, 257 aa, Xenorhabdus sp.
VLALLEDDTIEQLVDHFLLVNQNPRFDALLVFLLNIHENRLECCNLPEPDEISSRRLYLDIDDVNNPLIQVMRKGTPTVWDSLNHGARIDDPHFRTFIAELPHNCGLYGIPLFDCNGQACGVIAIFAENVSHFTNNENMFGIYCHVMQHRLKKLQELEQLRGQLRQIRQVFQVQRQKEKQLDELLASLSESKNAGAGSISVDYSHIDNLPKAIEEFESAVLVQRQRQFGNDTRLIAQSLGIAQRTLVYKLAKYGCRL

SEQ ID NO: 7019 - protein, 656 aa, Xenorhabdus sp.
KLRNSELMTLVLGALQAGAAVKGEFEKRFKGIMAEVIQSPKPIILFIDEAHTLIGAGNQAGGLDISNLLKPALARGELKTIAATTWSEYKKYFEKDAALSRRFQLVKVSEPSAEEATVIMRGLRAIYEQAHGVLIDDEALKASAVLSDRYLSGRQLPDKAIDVLDTACARVAINLTSPPRQISSLTTELHQMQMEIDVLEREQRMGLNEHSERLEELQNQQQETQEQLTALESDWQQQQELVKQVIELRSQLLSDDKEASQDADREKQAADEVSDNSEHDATEQEEVQEETVTEPADVKSLIEKLAELNEQLAELQKKQTLVSPHVDKTQIAGVIAEWTGVPLNRLSQSELSIVTELPVHLGQNIKGQDVAIQCLHKHLLTARADLRRPGRPLGAFLLVGPSGVGKTETVLQISELMFGGRQYLTTINMSEFQEKHTVSRLIGSPPGYVGYGEGGVLTEAIRQKPYSVVLLDEVEKAHPDVLNLFYQAFDKGELADGEGRIIDCKNVVFFLTSNLGYQTIVDYAEQPEQINDQLYPELAAFFKPALLARMEVIPYLPLGHETLKTIIQGKLARLDKLLTQRFNAEVTISDDVSEEILLRATRAENGARMLESIIDGALLPPVSLLLLQKMAAGTAISAIRLTVAEHEFQAEIEEAE

SEQ ID NO: 7020 - protein, 105 aa, Xenorhabdus sp.
MGLFSGCPSPPADFVVADKGYDSQALRTYIEEQGATAVIPYRKNSRNSDKKWDKDLYRYRHLVENAFARIKHFRAIATRYDKLARNYASTLALAFIIIWLPMWVE

SEQ ID NO: 7021 - protein, 42 aa, Xenorhabdus sp.
VLPDNPIRKKHTVTRNQVESSVSNIFGFGYSHANFFNSYFGA

SEQ ID NO: 7022 - protein, 396 aa, Xenorhabdus sp.
MCFLIIQSGKSTLLHETKSKVVSVISLALATHMPISSTATSEPNLMTKTFKVPFAAQGDRVSISDQPREDGTVSYAQGYGSGYGLDPNEDPTAMNIEREKMNGIFHDITEAVGGMQAFGAAQWSSDAQPYPLRALVYHKQKVWQSRIENNKEEPKAENAWVELKADPTAGEVGAYSKEESDIRFQAKGNYAPAGNYALKGESYTKPESDGKYQPKGNYALKGDSYTKPESNAKYQPVGNYLTAGYSYSKGESDGRFQPKGNYQPAGNYQPAGNYQPAGNYALRGESYTKSESDGRYMQRRRNNETVIWSGWVTQGGSVYCNRDVLGRLLYFRFGEWSQKGWYFPVLVPASIGRTSVYTLMGNNWLAIRLINSSSFVVVATPVGWDQIILSDSTTTD

SEQ ID NO: 7023 - protein, 112 aa, Xenorhabdus sp.
MANTEKEKFAQINLGQRLEGLNHLSKIRAIYWGDDEKELKRFLADMRDKRDCHYEENKRALSAIFYLANIPRARHDSEISQFTSEEKHSLIKAMNHIKVVVSQFPRHLTLPS

SEQ ID NO: 7024 - protein, 104 aa, Xenorhabdus sp.
EIKMGADSGGRPAIERLVRAYGFKSRQALSDHLGVSKSTMANRYLRDSFPADWIIQCNLETGASLLMAEYRARRDVSKRRRDQKNRTIGRYHCAVNLPCKTVRR

SEQ ID NO: 7025 - protein, 242 aa, Xenorhabdus sp.
LTADKAFVKDCDTLIYYWPKSKQEARFQLRSLFSILPVGTNIFIVGENRSGVRSVDKLMEGIVTFRKVDTARRCSLFYGQLEQQVQFDQNNWWHSYQVGDTIVNTLPGVFSQDDLDVGSRLLLSTFDKPISGNLLDIACGSGVLAAVLGKNNPDLSLTLSDVNAAAITSSKATLKANKLEGNVITSNVYSAIEEKFNWIVSNPPFHDGLKTSMAAADDMIRLAPNYLKSGGKFRIVANSFLP

SEQ ID NO: 7026 - protein, 48 aa, Xenorhabdus sp.
MKDSVVPYKEAEGAQALWAKEGVIQMMEDCELHGQKITIKPSEVVDIK

SEQ ID NO: 7027 - protein, 687 aa, Xenorhabdus sp.
MQQLTSYICGEWVYGNGNARTIHHAVSGAALYQVCSDDLPLADSLKYAREKGGKALSAMTFQQRAQMMKAVAKHLLANKEALYAISAETGATRSDGWVDIEGGIATLFSYAGLAGRELPDDVLWPEDEMIPLSKQSQFVARHVLTSRSGVALHINAFNFPCWGMLEKLAPTWMAGMPAIIKPATASAQLTQAMVKLILDSGLVPEGALQLICGGIGDLFDHLDYQDAVTFTGSAQTGHKLKSHPRLIEKSIPFTMEADSLNCCILGEDVTPDMPEFGVFIKEVVREMTVKAGQKCTAIRRIIVPESQLESVKQALVKRLSGVVVGDPALPDVRMGSLISLEQRDEVQSKVDLLLQSGCELLHGGSLAKLQLADKTNSHGAFYPPTLLYCADPMTNQAVHETEAFGPVSTLMAYQETEQAIELALMGQGSLVGSLVTADEQIAMQVIRATACAHGRMLILDEAASAESTGHGSPLPMLVHGGPGRAGGGEELGGLRAVKHYMQRTAIQASPSMLAAIGREWVRGAKVKEDPVHPFRKYFEQIEIGESLLTARRTVTEADIVNFACLSGDHFYAHMDKIGAAESLFGERVAHGYFVVSAAAGLFVDASVGPVLANYGMENLRFIEPVKIGDTIQVRLTCKKKIKKVQKTPDDKPHGVVMWDVQVLNQEQQPVALYSILTLVERQLRDYV

SEQ ID NO: 7028 - protein, 198 aa, Xenorhabdus sp.
MPVYQLDGLTPVIDPSSYVHPTAVLVGDVIIGKQVYIGPNASLRGDFGRLVVMDGSNIQDNCVMHGYPQQDTVIEENGHIGHGAILHGCQIRRNVLVGMNSVVMDGAEIGENSIVGAMAFIKAEAIFAANQLIVGTPARALRTLTEQELEWKRISTREYQDLVTRCKNTLRQVEPLTEIEPGRKRMVFSDDFVPKNQL

SEQ ID NO: 7029 - protein, 310 aa, Xenorhabdus sp.
MTHKLDDFIRHALDAQTISGTSLIISLYGDALSHRGGEVWLGSLSLLLEPLGFSDRFVRTSVFRLQKEDWLEVEKIGRRSYYRITERGMNQFRHAESKIYLSEQPAWDGKWDLLLLEETSKEERTRLKKELNWFGFSQLNSTLMAAPSSSQSDIPALLGELNASDSVIYFRADYPYPRSEQSLKERVSASWSLDQVAQHYHEFIITFRPLMKLLQDCYADELTPERCFQLRLLLIHFYRRVVLRDPLLPDALLPTQWEGQIARNLCINIYQRIGPAATRYIGEQCETTIGKLPQPAAAYYRRFGGLHSGS

SEQ ID NO: 7030 - protein, 428 aa, Xenorhabdus sp.
LDSVEFASRDEIQARQFKQMKWTLHHAYNNVPMYRRKFDAIGIHPSDFRQLEDIAKFPYTTKQDLRDNYPFDTFAVPMEKVVRIHASSGTTGRPTVVGYTQQDIDNWADLIARSLRFAGATAKDKIHVAYGYGLFTGGLGAHYGAERLGAAVIPMSGGQTEKQAQLICDFKPDVIMMTPSYCLTLLDVLERQMGGDARQCSLRVGIFGAEPWTEGLRHEIETRMGIKALDIYGLSEIMGPGVAMESLEYADGSTIWEDHFYPEVIDPDNLNILPDGENGELVFTTLTKEAMPMIRYRTRDLTRLLPGTARNMRRMDRITGRSDDMLIIRGINVFPSQVEEQITRFSELSPHYQLEVDRVGNYDSLSVKVELKDPAQLSIQQRCDICHQLRHHIKAMIGINTEVSIVNCGDIPRSEGKAVRVLDHRQQK

SEQ ID NO: 7031 - protein, 404 aa, Xenorhabdus sp.
MTHAFICDGVRTPIGRYGGALASLRSDDLAALPLRALLARYPGLDWQAIDDVILGCANQAGEDNRNVARMATLLAGLPYSVPGTTLNRLCGSGLDALAFAARSIKAGETQLVLAGGVESMTRAPLVMGKAETAFSRQAQIFDTTIGWRFINPLIQKQFGTDSMPETAENVAALFDISRDAQDAFALRSQQRTAKAQQQGILAEEIIPVTLPDRRKKGENTIISQDEHPRPETTLEQLQKLKTPFRTEGTVTAGNASGVNDGAAALIIASEVAALKHGLTPKARIVATATSGVEPRIMGIGPLSATSKVLALTGLSLNQMDVIELNEAFAAQSLAVMRQWGLPDDAEHVNPNGGAIALGHPLGMSGARLALTATLELERRAGRYALCTMCIGVGQGIAMIIERIS

SEQ ID NO: 7032 - protein, 144 aa, Xenorhabdus sp.
MYTKDACANHMGMQIDYIDIGIAQLSMTIVPTMLNGHKTCHGGIIFSLADTAFAYACNSEGTAAVASGCNIDFIHPVFNGDRLTANASVQHQGKTNGLYDVKITNQNGKTVAFFRGHSHRLGHSVLEEPAKATTPTKTIRKEKS

SEQ ID NO: 7033 - protein, 557 aa, Xenorhabdus sp.
MNMPVHHRPTFSDSTANESIPEGPIAVIGAGTMGIGIAQVAALAGHSVLLFDANVEAAQRALDTLHTRLHQRVTAGKADADKTQALLQRITLVNSLQALAPCILVIEAIIEQLEAKQKLFHQLESLCSEQTIFASNTSSLSITAIARVLSKPQRMAGLHFFNPAPLMKLVEVVQGLETCPQIIATLKCLMINWQKQPVICRSTPGFIVNRIARPFYAEALRALEEQVASPATLDAVLKDAGGFAMGPLQLTDLIGHDVNYAVTESLFHAFYGDPRFQPSLRQKELVEANHLGRKSGRGFYVYSDTNNAEKNSVDKKPQLFPEIEEKQAAEPITSAQINANGDWSTLPHFAALLQDKLQENGVFCGEKCNIPLPSPALQIDDVLFMLATGKTSSQLADEIQAPVVQFDLSANHHAAPIITISAASQNTQQQTAKVARFLHFLGKQVILLPDYPAMLTMRTVAMLCNEALDALNKGIASAEDIDLAMCRGVNYPIGPLAWGTQLGWQHIFNTLENLQQFYGETRYRPSPLLRQLAAGHVTLQSPSLRQHEYQHKKKDHA

SEQ ID NO: 7034 - protein, 259 aa, Xenorhabdus sp.
ILTEVKAGVLSIKLNRPKLINSINEEMHLQLSEALKIAEQDESVRCVLISGAGRGFCAGQDLNDRSSVINVGGVPDLGYSLETYYNPLIRRLTILPKPVICAVHGVAAGAGLSLAMAGDIVLASRNTTFIQAFCRIGLTPDAGGSWFLPRKIGHARAMGMAMLGDKISAEQALEWGMIWQVFEPKELEEKAWEIAQRLASQPTVSLACIKKSTYAAATNTLDQQLELERDLQRQCGHTEDFQEGIRAFMEKREPQFKGK

SEQ ID NO: 7035 - protein, 257 aa, Xenorhabdus sp.
MNQEWVLSLQQQRVRTLTLNRPEVRNALSNDCLELLVQRLEQADADAGTGVIIITGSLRCFAAGADLKELQQQTVASAITDRRPQLWQRLNNISKPMIAAVNGYALGAGCELALACDLVICGENASFGLPEITLGLMPGAGGTQRLIRSVGKALASQMILTGEAINAHQAQQAGLVSEICIDNLTLKRAQQIADRISEFSPLALRAAKAALKTAYETSLSQGLSAERQHFVALAGTADRQEGISAFLEKRKPTFKGC

SEQ ID NO: 7036 - protein, 396 aa, Xenorhabdus sp.
VQSTLSLSALSGTFRLFQMYLREQQMAILPQPGSQQKQSHRTQFHRLRIAAIEQETPDSVAVTLNIPDELKEYFHYQPGQHLTLKAEVNGEELRRCYSICSSPLDDTLQIGVKAIYQGRFSTFINQQLKVGDELDVMQPQGNFGHPPDTSQPGNYLAIAAGSGITPILSIIKSTLALEPDSTFTLIYGNSTSRSVMFREALADLKNRYLQRFQVMYLFSQETTDSPLLNGRINTENLLRIGKILLNFSQFDHAFLCGPETMLDDAKSALEQAGMESEHIHSERFNTGNHPLYTNSHPASLAGRNETSVEIHLDGRTLNIVMNTEDNSILDAALRQGADLPYACKGGVCATCKCRLKSGEVDMGVNYSLEPDQLTAGYILSCQSWPKGDGVVVDFDV

SEQ ID NO: 7037 - protein, 183 aa, Xenorhabdus sp.
MEQQLSSLQSIALQSIALQQPEIHQIWQCLHQIADPELPTLSITDLGMVREVTASQNEQNGQKGWQVVFTPTYSGCPATDFLINEIRTTLALAGFSPVSIDVSLSPAWTTDWMNADARKRLRESGIAPPQGAACEKPADTESITCPRCGSHQTEKISEFGSTACKALYRCQHCLEPFDYFKCI

SEQ ID NO: 7038 - protein, 249 aa, Xenorhabdus sp.
YVLRLGDSPLILAQRLCEWCGHAPELEIDLALANIGLDLLGQARHFLSYAATLDGTDAEKNRESDEDRLAFGRDEREFRNLLLVEQPNGGFNDTLVRQFFIDAYHVLLHQALGQSRDTQLAAISNKSLKEVEYHLRFSRGWMIRLGDGTEQSHEKMQQSVNQLWRFTGELFHCDEVEQQLAETGIAVDPRTLHEPWQQMVKDTFAQATLEIPQETPYRQGGKQGRHTEHLGYILAEMQFLQRAYPDNNW

SEQ ID NO: 7039 - protein, 95 aa, Xenorhabdus sp.
MNNTDWPLYEVFVRSKQGLAHRHVGSLHAADDQMALENARDAYTRRNEGCSIWVVKSIYLVASQPEDRGAFFEPSEDKIYRHPTFYTIPDGIKNM

SEQ ID NO: 7040 - protein, 308 aa, Xenorhabdus sp.
RQAHFDAKIEADITIEAKDWMPDAYRQNLIRQIGQHAHSEVVGMLPEANWIPRAPTLRRKAVLLAKVQDEAGHGLYLYSAAETLGCTRQDIYQKLLDGTMKYSSIFNYPTLSWADIGVIGWLVDGAAIVNQVALCRASYGPYARAMVKICKEESFHQRQGYEAVTVLAKGSKTQRAMLQDAINRFWWPTLMMFGPNDSDSPNSAQSMAWKIKRFSNDELRQKFIDNTVPQLEALGMTAPDPELAWDETTGHYRFGEINWDEFNQVIKGHGICNHERLEAKRRAWENGSWVREAASSHARKMAAKKQAA

SEQ ID NO: 7041 - protein, 306 aa, Xenorhabdus sp.
MKINRTDFSQLVNIAMQNDQVTHMRPVVEKELLHYDILFCLEQGGLLDELVFQGGTSLRLCYGGSRFSEDLDFAGGKDFSSSQLKDMKQCIEDYIGKRYGLEVTVKEPDILKQQPEYSELKINKWQISIITSPGRKDLPKQRIKIEVANIPAYTRNILPLRNNYSSLPDGYNDTLIHVETLDEIMADKLISLPATRNYVRHRDIWDLVWLQQQNAKLNTDLVMKKIADYKLINFTTLLELRLQSLPEIITGKAFVAEMERFLPSDTFTRTLGNKKFIPYLISNLKELFQKLQNSLSENDNQPKFRM

SEQ ID NO: 7042 - protein, 178 aa, Xenorhabdus sp.
MNHMTAIQYLNKFDQQGRYVFTTKDLAKVFSEDSKRAFEAGLNRLVKHGVLLRACKGIYVFALSQHNGLDTLELIARAMRRGEYSYVSLESALSEYGAISQIPIDRLTVMTTGREGTYRTPFGTIEFTHTKRSVPDIINNIKEIGRPLRLASKQTAYRDLKRVGRNTHLVEKEVINED

SEQ ID NO: 7043 - protein, 92 aa, Xenorhabdus sp.
LMKQRAIEYSTQFQKDVKLAQKRHKDIEKLKELMKLLINNELPLPTVYKDHPLNGNYKGYRDAHIEPDWILIYKITSDLLRFERTGTHSDLF

SEQ ID NO: 7044 - protein, 365 aa, Xenorhabdus sp.
GNTITEIAIPWLILEISGSPLLVAAVMSAKMLPLILSVFFSAQLVDRYGEFRISVLSDVVNFLSVLLIPVFYTMDILHFYLLAILLIFSTILDAPGRLAKDIMLAKEIKLHKRENELINGINSTIENICDLVGPAVGSLIIAMLGTINALYFDAVSFLVVALGIIILKKHFSADINQITETPSLPHHYFLEALRYIKSEKELFSVLILSSIINFVITPFLTVYLPYVNKTEFNSVISLGVSMTCFGIGTALSSLLYGLYGKYFSSHRILLSGYGLLGLCFLSLPLFNEQYVLFIQLFAIGCSIGFAAPVEITLIQRKVPENLFGRIMTLFTSTRFISVPVGYISFGAVLESSIAQQIPIIMAVIV

SEQ ID NO: 7045 - protein, 86 aa, Xenorhabdus sp.
MAANAFVRARIDEKLKNEAAAVLASMGLTVSDLVRITLTKVATEKALPFDMRIPNELTAKTIANSEKGIDVHQAKDADDIFDKLGI

SEQ ID NO: 7046 - protein, 356 aa, Xenorhabdus sp.
VAKSKLSKGQQRRVQANHQRRLKQPLSRNDAQKPELDDSQFGEPQEGLVISRFGQHADIEAADASIQRCNIRRTIRSLVTGDRVVWRPALQLQSDVKVNGIVEAVHERTSVLTRPDYYDGIKPIAANINQIVIVSAILPELSLNIIDRYLVACETLNIEPLIVLNKIDLLDEESREWVNGVMDIYRHIGYRVLEVSSHTGEGIPELVQLLADKISIFAGQSGVGKSSLLNTLLPDNENTILVNEVSDNSGLGQHTTTTARLYHFPQGGDVIDSPGVREFGLWHLTPEQVVQGFIEFRDYLGSCKFRDCKHLDDPGCALRDALERGVIAEERFENYHRILESMAQVKPRKNFTEGQK

SEQ ID NO: 7047 - protein, 309 aa, Xenorhabdus sp.
VLDNIKIRLQYLLPKQCITHLAGWFANKKAGWLTQLVIKAFAKVYKVDMNEAQNPSFQAYSTFNEFFVRPLKEDIRPVVNETHLLALPADGAVSQLGAIREEQIIQAKGHYYTVEALLAGQHQLAEQFRNGHFVTIYLSPKDYHRVHMPCDGVLKEMIYVPGDLFSVNPLTAANVPNLFARNERVICIFDTAFGPMAQILVGATIVGSIETVWSGCVTPPREGIIKRWVYPAEGEEGAVSLKKGEEMGRFKLGSTVINLFAPNQIQFANNLYSGSQTLMGGLLAQTISNDEEHTEHTTDDVSVNQNSAS

SEQ ID NO: 7048 - protein, 1114 aa, Xenorhabdus sp.
VRLIISLFLSLLIANLAFASTTQLDENQLKQELKQVEGSKNPQDAEIAQALQGAITWISDTKSSKERIAKYQQSIDDFPKLIKELRQKILATSEPPPAIQANQAISSLEQQIIQLNSQLLEQERQLQQEQEKIREISESVNLMPQQQTEARRLLAEATSRLQSLNTPSPGLSEAQLTLAQAEVNARKTATSELEMAQLSANNRQEIARLRAELFKKRYQNLDIQLQQLRSQLNAKRQQKAESALEHTEMLAEQNGGKLPQFLLDELQQNRHLSQMLNQQTQRMDSIGSQQRKAADDILRVRQTLNTIREQAQWLGDSTTLGAALRAQLTRIPDVPKSQQLDRNIVELRVERLKYEEMLEHSQRESEHTPITNSSLTPTQKQVYDSLIRTRKELLNSLLSGYDSEILELTKLKVSTSQLNEALKEVKDATHRYLFWVADVNPISLNYPLLVVRDLTRLLSLDTISQLGIAIHVMLTTQDTLLYLLGTLLLVIFSISSHRQYHAFLERSSNRIGKVTQDHFSLTIRTVFWSVVAALPLPMLWSAIGYGLKNAWQYPMATAIGNGVSETTPILWIFMLSAAFAHPNGLFIAHFRWPEERVKRAMRFYRVSIFLIVPLMMALITFNNYSDREFGATLGRLCFLMLCVSLSLVTTSLKRAGIPLYMDKHGSGENVINSVLWWILLSAPILAALASVLGYLQTSQALLARLETSVAIWFSLLVIYHITRRWMLIQRRKIAFERAKQRRADILAQRAKSEEDSSNINSSVEGVIEVEEPVIDLDAISAQSLGLVRSILTMLALVSLILLWSELHSAFSFLENIRLWDVTTSINGIDTIQSITLGSILIAILVIIITTQLVRNLPALLELALLQHLELTPGTGYAITTLTKYGITLIGSIVGFSLVGIEWSKLQWLVAAMGVGLGFGLQEIFANIISGLMILFEKPIRIGDTVTIRGLTGSITKINTRATTLTDWDRKEIIVPNRAFITEQFINWSLSDTITRIVLTIPVPVETESAKATEILLTAARRCPLIIDNPMPEAYLVDLQQGIQIYELRAYAAEMGHRMPARHEVHQYILQEFHNHNITLPFPPFQARVDIFGQEIRSATTNTSGRNLPRKPGDL

SEQ ID NO: 7049 - protein, 161 aa, Xenorhabdus sp.
METIQHPTQPLTQEEARKIIGEVFIYQMPFNQLLGLELIRFEQDYAELQFCNQDKLLGNMAQKILHGGAIASILDVAGGLVCAGGALNMMKTITLEEIRKRLPTLGTIDLRVDYLRPGRGEIFTASSNIIRAGNKVSVARIELHNEKQVHIASATGTYLVG

SEQ ID NO: 7050 - protein, 42 aa, Xenorhabdus sp.
MKETWTLFTKGPAFATRITRVISAGLIETPTMPMIRKAITLI

SEQ ID NO: 7051 - protein, 181 aa, Xenorhabdus sp.
MSKSENNLIWIDLEMTGLDPERDRIIEIATIVTDSELNILAEGPVIAVHQPAEQLALMDEWNVRTHTASGLVERVKQSSFSEAEAEKATIAFLEQWVPAGKSPICGNSIGQDRRFLFRYMPELEKYFHYRYLDVSTLKELARRWKPEMLAGLSKKNTHQALDDIRESIAELVYYREHFIQK

SEQ ID NO: 7052 - protein, 117 aa, Xenorhabdus sp.
MNWYFQVLKNYADFSGRARRKEYWMFYFFNMLAFLAVCILGAILGETIGLILVVLYALITFIPSLAVTVRRLHDTDRSGWWFLLVFVPIGGIVVFIFTLLEGTEGSNEYGADPKGLR

SEQ ID NO: 7053 - protein, 257 aa, Xenorhabdus sp.
FLSSVAHALQLEAFKHGQVLLPGDSGDNRIREKELINNLLNRQIDGLLYTSVDRHPYIDLIQASGTPCVMLDWVYADSNVSAIRVNERIAAFKVTQHLTEHGYRDVAIICGPLSMLNTQDRLSGWRDALEQANLAIKKEWIFSTDYTRLGGYEATLRMLKGKLPQALFASNELQAFGCLRALAEHKIKVSADIALVCFNATQQSLYNVPSLTAVRQPVDQMAQTAINILRTWNGRAQECEFEFELQIGESCGCQPER

SEQ ID NO: 7054 - protein, 266 aa, Xenorhabdus sp.
MYHVVASDLDGTLLSPDHVLTPYTKKILNLLTDKGIHFIFATGRHHIDVGQIRDGLGIDAYMITSNGARVHNSQGDLVFSHNLAPEIARDLCLLEFDNPDVLTNYYNNDEWWVNRASEEQTEFFKVSDFHYQIFQRDNFPVNGVCKVYYTSDDHDYLVQLEERIEARWGDKVNVSFSLRNCLEVMSGGVSKGEALAQVCQSIGYELSDCIAFGDGMNDREMLSVAGKGCIMQGAHQRLKDTLPDMEIIGSNADDAVSCYLQKMYQV

SEQ ID NO: 7055 - protein, 331 aa, Xenorhabdus sp.
MVPERLKASWLNREPQFSAFTNGLLLDFWNIRDEREFMGVDNIPIRYVSFSSPHHDKTLVISPGRSESYVKYPEVAYDFYHLGYNILIIDHRGQGRSGRMLTDPQKGHVESFDHYVDDLAKLIELEISSLKSHRCYALAHSMGGAILSSLLLRHASVFRAAALCAPMFGINLPMPRWAANFLVNQAEPYPGRRNRYAVLTGQWRPLPYFINLLTHSYARYQRYLRYYVDYPELRLGGPTYRWMRESMRAGDSLVEKAGEIQTPLIVLKASEDKVVSNRELLAFCASRQKAGAGKEEYNPLVIQGARHEILFEKDALRAQALNAICDFFDQN

SEQ ID NO: 7056 - protein, 608 aa, Xenorhabdus sp.
VSTAEVISTASLAEQVLRKTFGYQQFRAGQQQVIDAVLDDRDCLVIMPTGGGKSVCYQIPALMKEGLTLVVSPLISLMKDQVDQLRANGIEAECLNSTQDREQQSDIIRRCRQGSIKLLYIAPERLVTDNFLEQLSNWRPALLAVDEAHCISQWGHDFRPEYRALGQLRRRFPDLPVIALTATADKTTRQDIVRLLELRDPIIHLSSFDRPNIRYTLVEKYKPLDQLWAFIRSQQGKSGIIYCNSRNKVEETAERLQKRGLSVAPYHAGLENNQRAWVQDAFQRDDLQVVVATVAFGMGINKPNVRFVVHFDIPRNIESYYQETGRAGRDGLPAEAVLFYDPADMAWLRRCLEEKPAGEQQDIERHKLNAMGAFAEAQTCRRLVLLNYFGESKQTTCGNCDICLEPPKRYDGLVDAQKALSCIYRVGQRFGIGYIVEMLRGANNQRIRESGHDRLPVYGIGKDHSQEHWMSVLRQLIHLGLINQNIANYSALQLTEAARPILRGEMPLQLAVPRIQSLKSRNQQNKSYSGNYDRKLFAKLRKLRKSIADENNIPPFVVFNDVTLIEMAEQCPITPDELLLINGVGQRKLERFGDAFMTVIREHFEGFE

SEQ ID NO: 7057 - protein, 282 aa, Xenorhabdus sp.
WKILVITCLLSTLAYGSDKQADAVRGSVISAMLQEYDSPFMLYPYDTNYILYTYSSRVNKQAISSYDWVDHARKDEVHFQVSFGFPIWRGIVGENSLLGASYTQRSWWQLSNKRESSPFRETNYEPQLFLAWLTDYELAGWHLREIEAGINHQSNGRPESTSRSWNRVYARLMAQKGNWQVDLKPWYRLTESNRRDDNPDMNRYMGYYRLKVGYHYGENVFTMQGRYNWNSGYSGGELGWSYPLSKHVRFYAQLFSGYGESMIDYNFRQTRFGIGVMLNDML

SEQ ID NO: 7058 - protein, 156 aa, Xenorhabdus sp.
MFEPLELTNDAVIKVIGVGGGGGNAVEHMVRERIEGVDFFAVNTDAQALRKTAVGQTIQIGNGITKGLGAGANPEVGRTAAEEDRESLRTALEGADMVFIAAGMGGGTGTGAAPVVAEIAKELGILTVAVVTKPFNFEGKKRMAFAEQGITELCKH

SEQ ID NO: 7059 - protein, 418 aa, Xenorhabdus sp.
MIKSTDRKLVVGLEIGTANVSALVGEILPDGMVNIIGVGNCPSRGMDKGGVNDLESVVKCVQRAIDQAELMADCQISSVYLALSGKHISCQNEIGMVPISEEEVTQDDVDSVVHTAKSVRVRDEHRILHVIPQEYAIDYQEGIKNPVGLSGVRMQAKVHLITCHNDMAKNIVKAVERCGLKVDQLIFAGLAASYAVLTEDERELGVCVVDIGGGTMDIAVYTGGALRHTKVIPYAGNVVTSDIAYAFGTPPSDAETIKVRHGCALGSIVSKDESVEVPSVGGRPPRSLQRQTLAEVIEPRYTELLNLVNDEILRLQEQLRQQGVKHHLAAGIVLTGGGAQIDGLAECAQRVFHTQVRIGRPLNITGLTDYVQEPCYSTAVGLLHYGKESHLGGDSDADKRTSVSGWFKKVSSWLRKEF

SEQ ID NO: 7060 - protein, 306 aa, Xenorhabdus sp.
MADKVAVLLGGTSAEREVSLQSGQAVVAGLKEAGINAHSVDTKYFDVTKLKEEGFSKVFIALHGRGGEDGTVQGVLEFLQLPYTGSGVMASALSMDKLRTKQLWQGAKLPVSPYVVINSHQFEQLNDFQIKEYVQELGLPLMVKPNLEGSSVGMTKVNDYSELRGALELAFQYDQIILVEKWMFGPEYTVAFLGDEVLPSIRIQAPEVFYDYDAKYISNETKYFCPSGLSVEKEQELADLALRAYKIVGCSGWGRVDIMDDGNGNFYLLEVNTSPGMTSHSLVPQAARQTGLSFSQLVARILELAD

SEQ ID NO: 7061 - protein, 454 aa, Xenorhabdus sp.
VLANEGYQISGSDLAPNPVTQQLIELGATIYFNHRAENVRNASVVVASTAIPADNPEIIAAREARIPVIRRAEMLAELMRYRHGIAVAGTHGKTTTTAMIAGIYAQAGLDPTFVNGGLVKAAGTHARLGTSRYLIAEADESDASFLHLQPMMAVVTNIEPDHMDTYQGDFENLKQTFVNFLYNLPFYGRAVMCIDDPVVKELIPRIGRYVTTYGFSKEADVRITHYEQKGAQGFFTISREDLPELHVVLNAPGKHNALNATAAVAVATEEGIDDAAILASLAEFQGTGRRFDFLGDFSLRNINNKEGSVMLVDDYGHHPTEVDATVKAARAGWPDKRIVMVFQPHRYTRTRDLYDDFANVLNQVDVLLMLDVYSAGETPIPGADSRSLCRTIRGRGKLDPILVSEPEQISVMLSQIMENNDLVLVQGAGNIGKIARNLAETKLQPSFNEGEHHG

SEQ ID NO: 7062 - protein, 337 aa, Xenorhabdus sp.
VFPGLAVAHYLKEQGWEIRWLGTADRMEADLVPKHGIEIEFIQISGLRGKGIKALLAAPIRIFKAIRQAKAIIRRYQPDVVLGMGGYVSGPGGIAAWLCGVPVVLHEQNGIAGLTNRWLAKIAKTVLQAFPGAFPDAPVVGNPVRKDVLALPAPAQRLADRQGPVCVLIVGGSQGARILNQTMPEAASRLGESISVWHQAGKGAQAETQKKYTDLAVADFRVTEFIDDMAQAYAWADIVICRSGALTVSEISAAGLPAIFVPFQHKDRQQYWNALPLEQAGAAKILEQPQFTADAVVELLKQWKRPQLQEMAEKAHSVAIIDATERVAAALTDAAKK

SEQ ID NO: 7063 - protein, 388 aa, Xenorhabdus sp.
KNWLAGNVETDPTDIVMYDRTLVWMVLGLAAIGFVMVTSASMPVGQRLAQDPFIFSNRDATYLGLSFGLSLITLRIPMAFWQRYSIVMLLMTIMMLVVVLFVGSSVNGASRWVAIGPLRIQPAELSKLSLFCYLSSYLVRKVEEVRNNFWGFCKPMGVMIALAVLLLAQPDLGTVVVLFVTTLALLFLAGAKLWQFLAIIGCGIFAVIVLIIAEPYRVRRVTSFLNPWDDPFGSGYQLTQSLMAFGRGDFFGQGLGNSVQKLEYLPEAHTDFIFSILGEELGYLGVVLVLAMVFFVAFRAMMIGRRALQLDQRFAGFLACAIGLWFSFQAFINVGAASGMLPTKGLTLPLVSYGGSSLIVMSTAIVLLLRIDYEVRLAKAQAFVRSPK

SEQ ID NO: 7064 - protein, 436 aa, Xenorhabdus sp.
MTKYEGKKVVIVGLGLTGLSCVDFFMARGVIPRVMDTRIVPPGSDKLPDNVECHTGSFNKQWLMEADLIVSSPGIALATPELQAAIDAGIEIVGDIELFCREATGPIVAITGSNGKSTVTTLVGEMAKAAGWQVGVGGNIGVPALELLKQPCQLYVLELSSFQLETTYNLRAAAATVLNVTEDHMVRYPEGLAQYRAAKLRIYDQAKVCVVNEQDDLTLPVAGKDSRCISFGVGSGDYRLDSEQQQLVANQQPVLSTREMCLTGQHNYTNGLAALALADAVNIPREASLLALRTYQGLAHRFQVVHMRNGIRWVNDSKATNVGSTQAALSGLMLEGTLYLLVGGDGKEADFTPLRSYLSGNNIRLYCFGRDGNQLAQLRPEISTLTDTMEQAMREITPKLVSGDMVLLSPACASFDQFSGFEQRGYEFSRLAEELG

SEQ ID NO: 7065 - protein, 360 aa, Xenorhabdus sp.
MLVWLAEYLVKYHTGFNVFSYLTFRAIVGLLTALSIALWMGPTLIAYLQKLQIGQVVRNDGPESHFSKRGTPTMGGLLILFSITISVLLWARLDNPYVWCVLAVLLGYGIVGFVDDYRKVVRKDTKGLIARWKYFWQSVLALGVAFAMYSIGKDTPATQLVVPFFKDVMPQLGLLYILLTYFVIVGTSNAVNLTDGLDGLAIMPTVLVAAGFALVAWATGNVNFANYLHIPYLSHAGELVIVCTAIVGAGLGFLWFNTYPAQVFMGDVGSLALGGALGTIAVLLRQEFLLVIMGGVFVVETLSVILQVGSFKLRGQRIFRMAPIHHHYELKGWPEPRVIVRFWIISLMLVLIGLATLKVR

SEQ ID NO: 7066 - protein, 460 aa, Xenorhabdus sp.
MIPLTLQQLAQVTEGTLHHVSGQQAAIIRIEAVTTDSRKITGGDLFIALKGENFDAHHFAADVAKQGAAVLLVERPLEVDCPQVVVEDTRLAMGKLAGWVRGQSNARIVALTGSSGKTSVKEMTAAILRQCGNTLYTAGNFNNDIGVPLTLFRLTLEHQFAVIELGANHIGEIAYTTEMVRPESALVNNLFSAHLEGFGSLAGVAKAKGEIFAGLSSTGTAIINLDSNDWHNWQQSISDQQTVWRFSITPAADADFYVTDIQEQPLETHFCLHTPIGNCEIALPLPGKHNIANVLAASALAISVGASLDNIRTGLLGLKAVPGRLFPVPLAAGKVVLDDTYNANPGSMIAAAQVLARMPGYRVMVVSDMGELGDQAIECHRQVGEAVASTDIEQLLSVGPLSAHISDASGRGQHFSSKAELVAALLPVLKQHETISVLIKGSRSAKMEEVVDSLKENFQC

SEQ ID NO: 7067 - protein, 500 aa, Xenorhabdus sp.
VEDRNLRDLLALWGINAPELPLREMTLDSRKAAAGDLFVAVKGHQTDGRKYIPQAIAQGVAAVIAEAEGKADNGTIQEMHGVPVIYLDDLNNKLSKLAGEFYQHPGNKLKLVGVTGTNGKTTTTQLLAQWSQGLGETSAVMGTVGNGLLGMTVPTENTTGSAVDIQLDLQQLVNQKATFAAMEVSSHGLIQSRVASLPYQAAVFTNLSRDHLDYHGDMESYEEAKWLLFSTHNVKQKIINADDDIGLKWLSRLPDAVLSETVAVTMENRLPENWQGRWLSATDIHYHDKGASITFTSSWGSGTLESPLMGAFNVSNLLLALATLLSLEYPLEKLLATVSCLIPVCGRMEVFSASGRPTVVVDYAHTPDALEKALAAARLHCKGQLWCVFGCGGDRDKGKRPLMGGVAEQEADRVVVTDDNPRSEEPQSIVADILTGFIDPGRAMVIHGRVEAVTSAIMQAAEDDVVLVAGKGHEDYQLVGNRRLDYSDRLTVARLLGVTA

SEQ ID NO: 7068 - protein, 584 aa, Xenorhabdus sp.
MKAARSLKLKKQEDKASFVKWRFVLLCGGISLALIGLLIRVAYLQIINPDRLVKEGDSRSLRVQSIPTSRGMINDRNGRPLAVSVPVDAVWADPKEVFEKGGITDDTRWQALADALSIPLDQLTSKINEYPKGRFVYLARQVNTSIGDYVGKLKLPGIYLRQESRRYYPAGQVTAHIIGVTNIDGNGIEGVEKSFDSWLTGKPGSRTVRKDRNGRVIEDISSVDSRAAHDLALSIDERLQTLVYRELTKAVVLNKAESGTAVLVDVNTGEVLAMANSPSYNPNNLAGTPKDAMRNRAITDMFEPGSTIKPLVVMSALNNGIVKENTVLDTRPYRLMYGSRGHEIKDVAPRSELTITGILQKSSNVGVSKLALAMPASELVDVYYRFGMGKPTDLGLVGEKSGVFPKNRQRWSDLERATFSFGYGLMVTPLQLARAYATIGSLGVYRPLSITKVDPPVPGTRVFPEHIMRTVVHMMESVALPGGGGVRAAIKGYRIAIKTGTAKKVGPDGKYVNKYISYTAGIAPASNPRFALVVIIDDPQAGKYYGGAVSAPIFGAIMSGVLRTMNVEPDALPADDKKEFVVDN

SEQ ID NO: 7069 - protein, 68 aa, Xenorhabdus sp.
VTVTHQTRLLTAEKERQAIQIDAQDIEWRNLLLEENALGDHSRIESIATEKFHMQHVDPAQENIVITQ

SEQ ID NO: 7070 - protein, 319 aa, Xenorhabdus sp.
MANSHFKHTSVLLDEAVNGLNIREDGIYIDGTFGRGGHSRLILSKLGPNGRLMAIDRDPQAIEASKAITDPRFSITHGPFSDLATYVKDAGLAGKIDGVLLDLGVSSPQLDDPERGFSFMRDGPLDMRMDTTRGQSASEWLMKAEADDIAWVLKTFGEERFAKRIARAIVARNQEEPITRTRELAELIAKASPIKEKHKHPATRSFQAIRIYINSELEEIERALDGALQVLAPQGRLSVISFHSLEDRIVKRFIQQHSQGPKVPAGLPLTEVQLRALGGRSLKSIGRLKPSEDEVATNPRARSSVLRFAEKAGDEKAGE

SEQ ID NO: 7071 - protein, 152 aa, Xenorhabdus sp.
MFRGATLVNLDTKGRLTVPARYRETLNTESKGQMVCTIDLHQPCLLLYTLPEWEIIEEKLSRLSSMNPAERRVQRLLLGHASECQMDSAGRLLLAHTLRQHAGLTKEVMLVGQFNKFELWDEQVWYQQVQSDIAAEQSTQEPLSARLQDLSL

SEQ ID NO: 7072 - protein, 168 aa, Xenorhabdus sp.
ALKAQELRQFPSESVLYLGALPELSVSFLREQGFREAWENDPRQVSYLYANSYEREAAADVFASWLEKNPLPQVLYTTSFALLQGVMDTILKRSGRLPEQLVIATFGDHELLDFLECPVLSVAQRHRDVAEQALSLVLASLDEKQRPEPGITRMRRHLCRRGSLSRKD

SEQ ID NO: 7073 - protein, 666 aa, Xenorhabdus sp.
LCYVDWPPRLMRHHYMTTETEISFADLGLSAPILSALQDMGYEKPSPIQQQCIPHLLNGRDVLGMAQTGSGKTAAFSLPLLHNIDAELRAPQILVLAPTRELAVQVAEACSDFSKHMRSVNVVALYGGQRYDVQLRALRQGPQVVVGTPGRLLDHLKRGTLDLSNLKGLVLDEADEMLRMGFIEDVENIMSQIPAEHQTALFSATMPEAIRRITRRFMKEPQEVRIQSSVTNRPDISQSYWSVYGGVRKNEALVRFLEAEDFDAAIIFVRTKNATLEVAETLERNGYNSAALNGDMNQALREQTLERLKNGRLDILIATDVAARGLDVDRISLVVNYDIPMDAESYVHRIGRTGRAGRAGRALLFVENRERRLLRNIERTMKLTIPEVELPNAELLSQRRLEKFAGNVQQQLESSDLDQYRALLSKLGTGEELDMETLAAALLKMAQGERPLILPPDPVRRPRREFNDRDDRRRNGNSFGERDRGDRGDRGDRGDRPRRERRDVGDMELYRIEVGRDDGVEVRHIVGAIANEGDISSRYIGNIKLFATHSTIELPKGMPGDLLSHFTRTRILNKPLNMQLLGDAQPFERRERRERRGGGRNGGNGGNGGNGARRDRDGFSNGNGGGRRFNNNERRGGGERGSFRGRGNDDFNGGQRRRQQPSNGNV

SEQ ID NO: 7074 - protein, 101 aa, Xenorhabdus sp.; identical to SEQ ID NO: 6521

SEQ ID NO: 7075 - protein, 423 aa, Xenorhabdus sp.
MTDKRKDGSGKLLYCSFCGKSQHEVRKLIAGPSVYICDECVDLCNDIIREEIKELVPHRERSTLPTPHEIRQHLDDYVIGQEMAKKVLAVAVYNHYKRLRNGDTNNGVELGKSNILLIGPTGSGKTLLAETLARYLDVPFTMADATTLTEAGYVGEDVENIIQKLLQKCDYDVQKAQRGIVYIDEIDKISRKSDNPSITRDVSGEGVQQALLKLIEGTVAAVPPQGGRKHPQQEFLQVDTSKILFICGGAFAGLSKVVSQRLNVSSGIGFSATVKGESEKATEGELLAQVEPEDLIKFGLIPEFIGRLPVVATLGELNEEALIQILQEPKNALTKQYQALFNLEGVELEFRKEALTAIAKKAMVRKTGARGLRSIVEGVLLDTMYDLPSMEHVEKVVVDETVVEDKSAPLLIYSKPDAQVSGE

SEQ ID NO: 7076 - protein, 794 aa, Xenorhabdus sp.
LAKAKRRESSMNPERSERIEIPVLPLRDVVVYPHMVIPLFVGREKSIHCLEAAMDHDKQVMLVAQKEASTDEPGVNDLFSVGTVASVLQMLKLPDGTVKVLVEGLQRARITTLTDNGEYFYAQVEYQDSPIVDEREQEVLVRTAINQFEGYIKLNKKIPPEVLTSLHSIEDAAKLADTIAAHMPLKINDKQAVLEMSDVVERIEYLIAMMESEIDLLQVEKRIRNRVKKQMEKSQREYYLNEQMKAIQKELGEMDDAPDEYETLKRKIENAKMPKEAREKAEAELQKLKMMSPMSAEATVVRSYIDWIVQVPWNARSKVKKDLVKAQEILDTDHYGLERVKDRILEYLAVQSRVSKIKGPILCLVGPPGVGKTSLGRSIARATGRKYVRMALGGVRDEAEIRGHRRTYIGSMPGKLIQKMSKIGVKNPLFLLDEIDKMSSDMRGDPASALLEVLDPEQNVTFNDHYLEVDYDLSDVMFVATSNSMNIPAPLLDRMEVIRLSGYTEDEKLNIAKRHLLPKQIERNALKKGELTIDDGAILGIIRYYTREAGVRSLEREISKLCRKAVKALLMDKALKHIEINAENLKNYLGVQKVDYGRADTENRVGQVTGLAWTEVGGDLLTVETASVPGKGKLTYTGSLGEVMQESIQAALTVVRARADKLGISSDFHEKRDIHVHVPEGATPKDGPSAGIAMCTALVSCLTGNPVNANVAMTGEITLRGLVLPIGGLKEKLLAAHRGGIKTVIIPDENKRDLEEIPQNVIQDLEIHPVKRIEDVLTIALQEPAFGAEVISLK

SEQ ID NO: 7077 - protein, 91 aa, Xenorhabdus sp.
VNKSQLIDKIAADVNISKAAAGRVVDAFISSVSGALKGGDDVVLVGFGTFTVRERAARIGRNPQTGKEIKIAAANVPAFRAGKGLKDAVNG

SEQ ID NO: 7078 - protein, 621 aa, Xenorhabdus sp.
MMDNLRTAANGPVLKIVLALIILTFLVTGLTGYLSSEGGNYAAKVNGQTISRAQLEQVFQQDKMSLQERLGDQFSALLSNEQEVRALKRQSLDSIINTVLLEQYANKLGLSASDEQVKEEIRKQRYFQTDGKFDNEKYLQVLTNAGLNPDNYAEQIRQDLISRQLRTILMSTEIALPAEIKQLAQLSLQERTARLATLELKSIEAQQSVTDQELKNYYNMNSKHFTVPEKVKISYIKMDAADELKNVTVTDADIEKYYKNNLSKYTQPERKKYSLIQLASEADAKSVLDELKKGADFSKLAEEKSTDKYSAKQGGDLGWMEESSSPDEIKSAHLTEKGQLSAVIKLSNGYAVFRLDDIKPQVVKPLADERSAIEKTVKQEKAIDAFYALQRKVSEAAANDNESLAAAEQAAGYKAVTTDWFDRDHVPADINFSQVVQAIFFGNLVDDKSPSGTNSDVISVDGDRAFIIRVDEVKPESILPFEEAKTEVTELVKRQKAEKQLQVDSENLLTALKAGKGDQALKTAGIQFGEPTVMARKTSPVTDVLFTLPHPKDGKPVYGLAYDGVGNAVLIQLDKVIPGSISEEQIKQAMMMEQYQISNTMFESLINNLRDNAEIKLGQID

SEQ ID NO: 7079 - protein, 107 aa, Xenorhabdus sp.
MPLSYAVAAEELVNKTTQLQPTDSHKITVEKSELNNKEEKTLSGKVNINTASVEQLAKELNGVGAKKAQAIIEYREKYGSFTAIEQLQEVQGIGPAFIEKNRDKLIH

SEQ ID NO: 7080 - protein, 136 aa, Xenorhabdus sp.
MSTIIKVRGYHIDVFQHVNNGRYLEFMEAARWDLFSDSDTLQWLNNNKIAFIIANININYRHPAVLGDELEVHSSMQELRNKSGTFFQKIIRKGDNRIIADALSTFVCVDLKTQQSLVLEGELRERLNEFKNETVK

SEQ ID NO: 7081 - protein, 87 aa, Xenorhabdus sp.
MLDKTDRKLLKLLQQDCSLSLNTLAEAVNLTSTPCWKRLKRLEDEGYIVGKVALLNGEKLGLGLTVIVMIKTQQHSSEWYEQFVIFC

SEQ ID NO: 7082 - protein, 85 aa, Xenorhabdus sp.
MTITEVKGFGRQKGHSELYRGAEYSVNFLPKVKLDIATHDERVEEIIHVIKQAAFTGKMGDGKIFVFELQHAVRIRTGEVNDAAL

SEQ ID NO: 7083 - protein, 232 aa, Xenorhabdus sp.
MKRAVVVFSGGQDSTTCLIQALRQYDEVHCVTFDYGQRHRAEIDVASRISKELGAAAHRVLDVTLLNELAVSSLTRDNIPVPDFSESEKNGLPNTFVPGRNILFLTLAAIYAYQVEAEAVITGVCETDFSGYPDCRDEFVKSLNNAVCLGIARKIRFETPLMWLNKAETWALADYYQKLDFVRSQTLTCYNGIQGDGCGECAACHLRANGLNVYLNNAESTMAEMKSKTQLN

SEQ ID NO: 7084 - protein, 338 aa, Xenorhabdus sp.
IQADYQRSADTHLIKLNLPMFPGIDLYLKDESTHPTGSLKHRLARSLFLYALSNGWIDEGTPIIEASSGSTAVSEAYFARLLGLPFIAVMPTCTAKRKIQEIEFYGGKCHFVEHSALIYEESERLAKELNGHYMDQFTYAERATDWRGNNNIAESIFRQMELEPFPEPTYIVMGAGTGGTSATLGRYMRYQGHTTKLIVVDPENSVFYDCYQQNCRQIRSSTSSRIEGIGRPRAEPSFIPDVINDMMQVPDCASIATIHWLEKLIGRKTGASTGTNVWGALQLAKQMHDNNQQGSIVTLLCDSGERYLDTYYNPDWVKNNIGDLTQYLTQLPKLNSYE

SEQ ID NO: 7085 - protein, 223 aa, Xenorhabdus sp.
NMFQLTQQQKASALIWLSLFHILIITSSNYLVQLPISIFGFHTTWGAFTFPFIFLATDLTVRIYGAPLARRIIMTVMLPALIISYFISALFFQGSWQGFSALGTFNLFVARIAAASFMAYVLGQILDVGVFNRLRQNQHWWMAPAAAMFFGNMLDTLAFFFIAFYRSSDAFMATHWVEIALVDYAFKLFICMLFFLPAYGILLNLILKFFFSHSSDKALAQSR

SEQ ID NO: 7086 - protein, 366 aa, Xenorhabdus sp.
MLKVIQSPSKYIQGPDAISYIGHYTKILADHVFVIADNFVLNLIGDTVSKSLKENEVTSHFEVFNGECSRKEIERLSAILLTNQCQAVIGIGGGKTLDTAKAVAHESKLPILVSPTLASTDAPTSALSVLYTELGEFDSYLFYPKNPDIVLVDTKIIAKSPVRLFVAGMGDALATYFEARASSTAHNPTMAGGTTSLTGLALAKLCYDTLLSEGYKAKLAVEAGVTTPAVENIVEANTYLSGIGFESAGLAAAHAIHNGFTILEECHHLYHGEKVAFGTLTQLILENSPSEELETVLDFCVQVGLPITLEQLGLRDSENLHQKIMQVAKVSCAEGETIHNMPFTVTPEQVYAAILAADQMGKDWLY

SEQ ID NO: 7087 - protein, 451 aa, Xenorhabdus sp.
MLSIFRPAPHKARLPAQEVDPLYRRLRWQIFMGIFFGYAAYYLVRKNFALAMPYLVEQGFSRGDLGFALSGISIAYGFSKFIMGSVSDRSNPRVFLPAGLILAAAVMLFMGFVPWATSSIAVMFVLLFLCGWFQGMGWPPCGRTMVHWWSQKERGGIVSIWNCAHNVGGGLPPLLFLLGMAWFNDWKAALYMPAFAAILVALIIFALMRDTPQSCGLPPIEEYKNDYPPDYTENDEKELTAKEIFMQYVLPNKLLWMIAIANVFVYLLRYGILDWSPTYLREVKHFALDKSSWAYFLYEYAGIPGTLLCGWMSDKVFKGNRGATGVFFMTLVTIATIVFWMNPAGNPNVDMICMLVIGFLIYGPVMLIGLHALELAPKKAAGTAAGFTGLFGYLGGSVAASAIVGYTVDFTGWDGGFMVMVGGSILSVILLLFVMLHENKHKQEMAQAHNS

SEQ ID NO: 7088 - protein, 351 aa, Xenorhabdus sp.
IMAGLLLASSMSGIAHAADKIVIAHRGASGYLPEHTLPAKAMAFAQGADYLEQDLVMTKDNELVVLHDHYLDRVTDVAERFPNRARADGRYYAIDFTLPEIKSLKFTEGFDIKDGKKVQSYPGRFPMGKSDFRIHTFQEELEFIQGMNKSTGKNVGIYPEIKAPWFHRQEGKDITAKVLEVLKQYGYTKKSDKVYLQCFDANELKRIKNDLEPKLGMDLKLVQLIAYTDWNETYEQKTDGTWHNYSYDWMFKPGAMKEVAKYADGIGPDYHMLVANDSTPNNIKLTGMVKEAHASHMVVHPYTIRIDQLPKYATSGNQLFDIVFDKANVDGAFTDFPDLAVKFLEEHHEHK

SEQ ID NO: 7089 - protein, 598 aa, Xenorhabdus sp.
VQTFNADLAIIGAGGAGLRAAIAAAEANPQLKIALISKVYPMRSHTVAAEGGSAAVTQSHDSYDFHFNDTVSGGDWLCEQDVVEYFVKHCPTDMTQLEQWGCPWSRKEDGSVNVRRFGGMKIERTWFAADKTGFHMLHTLFQTSLKYPQIQRFDEHFVLDILVDEGRARGLVALNMMEGSKVQIRANAVIMATGGAGRVYRYNTNGGIVTGDGMGMAFRHGVPLRDMEFVQYHPTGLPGSGILMTEGCRGEGGILVNKDGYRYLQDYGLGPETPLGHPENKYMELGPRDKVSQAFWHEWRAGRTIATPRGDVVHLDLRHLGEKKLLERLPFICELAKAYVGVDPVKEPIPVRPTAHYTMGGIETNQQCETRIKGLFAIGECSSVGLHGANRLGSNSLAELVVFGRLAGEEAAKCAQEAPPANENALAAQVHGIEAKLNKLLNQQGGESWAKIRDELGTAMEEGCGIYRTPELMQKTIDKIVELKERFKQIQISDRSSVFNTDLLYTIELGFGLDVAECMAHSAMNRKESRGAHQRLDEGCTERDDENFLKHTLAFYNPEGAPHLEYSDVKITKSQPAKRVYGGEAAAQEKKQKEQAND

SEQ ID NO: 7090 - protein, 236 aa, Xenorhabdus sp.
MEVMRYNPETDDAPYFTTYDVPYDDQTSLLDALGYIKDNLAPDLSYRWSCRMAICGSCGMMVNRVPKLACKTFLRDYQHGLKVEALGNFPIERDLVVDMTHFIESLEAIKPYIIGNDRKPSDGPNVQTPAQMAKYHQFSGCINCGLCYAACPQFGLNPEFIGPAAVTLAHRYNLDNRDHGKKERMPQINSDNGVWSCTFVGYCSEVCPKHVDPAGAIQQSKAESAKDFIISMLKPQ

SEQ ID NO: 7091 - protein, 133 aa, Xenorhabdus sp.
VKVMTTKRKPYTRGMEPNWWQKLGFYRFYMLREGTSVPTVWFSILVLYGLFALKAGPESWGGFVSFLQNPLVLLINIITLLAALLHTKTWFELAPKALNIIVKNEKMAPGPIIKLLWTFTIIATAVILGIALL

SEQ ID NO: 7092 - protein, 33 aa, Xenorhabdus sp.
MHDLKIHVPAGKWVFYGAAAILTVMALIGVFTL

SEQ ID NO: 7093 - protein, 80 aa, Xenorhabdus sp.
MSDVFANPDKTLDTQGLRCPEPVMMVRKTVRHMDVGQTLLIVADDPATTRDIPGFCRFMEHTLLAHETAETPYRYLIKKN

SEQ ID NO: 7094 - protein, 371 aa, Xenorhabdus sp.
MVMWIWEQKNWPDFQWNERELISILREINFNQGLLLGLSATENNEQATLDNLLASILYSCEIEGEKLNVASVRSSLANHLGISEETPYPISEQSDGIARIAFEVVEKYQEPLTLERILQWHEWMFPVGYRLINPISGGQLRHGGIEVVSGRIDKPVVHFSAPPAERLPQEVAEFIAWFNRSYYDPNLDPILRAAIVHLWFVTLHPLEDGNGRITRFLTDLALAQAESRSIRLYAMSVSICESRKQYYEMLEQTQRGGLDITGWMKWFLQTLNNTLIVKLKQIDGTVKKTRFWRRVDQRQLNEEQVKVLNRMLDGDFSQGINSSQYQKVAKVSRATATRHLIYLTELGYLEKTEAGGRSTRYVIHHVNGVTK

SEQ ID NO: 7095 - protein, 394 aa, Xenorhabdus sp.
DNSFESCIKCTVCTTQCPVVKVNPGYPGPKQAGPDGERLRLKDPALYDEALKYCTNCKRCEVACPSDVKIGDIILRAKADYHSQRPKLRDVILSHTDMMGTLSTPFAPIVNSVTSLKPVRHLLDKTLRIDHRRELPKYAFGTFRRWYHKQASIQQQFTEQVAYFHGCFVNYNHPQLGKDLLKVFNGMGIGVQLLTREKCCGVPLIANGFINRAKRQAKANLHSLTESVIERQIPVVTTSSSCTFTLRDEYPHILGVDTRPIRDHIELATRYIYRLLDQGRDLPLKPMPLKVAYHTPCHMEKMGWAAYSIELIKRIPGIELIILDSQCCGIAGTYGFKKENYEVSQGIGAGLFRQIEASGVDLVITDCETCKWQIEMSTSKKCEHPMSLLARALD

SEQ ID NO: 7096 - protein, 568 aa, Xenorhabdus sp.
MNGSPVTETDVIIIGGGATGAGIARDCARRRLRCILLERHDIATGATGRNHGLLHSGARYAVTDSESAKECIKENRVLKSIARHCIEKTHGLFITLPEDSLEYQQTFIAACEKAGIDAQSIDPEEAKRFEPAVNPDLIGAVIVPDGTVDPFRLTAANMLDAREHGAQILTYHEVMGLIRQEDKITGVHVYDHRTKRLYDIYAPIVVNAGGIWGQKIAEYADLRVHMLPAKGSLLILGHRINNMVINRCRKPADADILVPGDTISLIGTTSSRIEYDQIDNMSVTKEEVDILIREGAKLSPRLAQTRILRAYAGVRPLVASDDDPSGRNVSRGIVLLDHAQRDGLDGFITITGGKLMTYRLMAEWATDKICEKLNITAHCTTAQEPLPGSENSAEQTRQHTSHSKSPHSKKPHCSTVTLSAPIRGSAIYRHGDRASQLLSTERSDKSLVCECEAVTAGEVRYATESLAVTNLLDLRRRTRVGMGTCQGELCACRAAGLLNRLGVITEQESEQQLKQFLNERWKGIRPVVWGDALRESEFTSWVYQGLCGLDDHDTDADNQPVTETDNEI

SEQ ID NO: 7097 - protein, 66 aa, Xenorhabdus sp.
MEQLTGNEAALWIVVINSKKQYSVWPDEYRIPIGWMATGKEGPKAECLEYIAGIWPEPTKKQTDMH

SEQ ID NO: 7098 - protein, 325 aa, Xenorhabdus sp.
MNEIADWQPTAPIANLLKRARILAEIRRFFADRGVLEVETPAMSQATVTDVHLVPFQTRFVGPGAADGLPLYLMTSPEYHMKRLLAAGSGSIYQMGKSFRNEEAGRHHNPEFTMLEWYRPHYDMYRLMNEVDDLLQQILDCESAESLSYQQAFIRYLDIDPLTVSKEKLREVAAKLDLSNIADREEDRDTLLQLLFTMGVETHIGIEKPTFIYHFPASQAALAEISKEDHRVAQRFEVYFKGMELANGFRELTDSKEQRLRFEQDNRKRESMGLPVQPIDEYLLEALAHGMPECAGVALGVDRLIMLALGAERISEVIAFPVGIS

SEQ ID NO: 7099 - protein, 51 aa, Xenorhabdus sp.
MIEDVGCNMIALKADTGKYLSRVTVGGVDYIKPDKVNLDVYCKFRVVTLIE

SEQ ID NO: 7100 - protein, 78 aa, Xenorhabdus sp.
MPPRIPRACRKQGCPKTTTDRSGYCPDHLHTGWQAHQQGKNRHARGYGSQWDKLRATIKQRDKHLCQQCLRQGRATTG

SEQ ID NO: 7101 - protein, 132 aa, Xenorhabdus sp.
MRNMQMILSQWGAWASEGHSAVDWAPIAAGFKGLTPSTRKSRIQCCDDDGFAIDAAVLRLKKHNPYSYQLIVLHYIKALPLRPMGIKLGISHNEVAKRLQAAEGFIEGVLAVSDVVLELDKCAQKEIIDKVA

SEQ ID NO: 7102 - protein, 87 aa, Xenorhabdus sp.
MYALKLITEKNGRSVEESWILGDMYRLEFYPKDVAEGVIACVEHTQNGNLINHEIKKTDQAYITTLTGDTVRTVCRGQHRFVAAPIQ

SEQ ID NO: 7103 - protein, 111 aa, Xenorhabdus sp.
MRMTEKDTEFWAHVWDWLIINAPFLGGMFLAASTAFAREKRDGSGWKASLVEAFICAAISVGIINALEYAQLPLSLAQFFGVLIGFLGTKKIGSILDAVFTFFKNKFGVHR

SEQ ID NO: 7104 - protein, 129 aa, Xenorhabdus sp.
MFTVKQIIENATSLYETKEITIARIGSPQWKQAFELTKELGIETPDVIEFIPPSYSDEEMTQVVEEEHSLSVAREGVNTDDCIAIVCSNIPSPTFPEIPELGGGGYQFLYKGDQLYVTNESGSTVEVVK

SEQ ID NO: 7105 - protein, 99 aa, Xenorhabdus sp.
MTEPNYEAIGRCQVLKEKIDALNAYRNQRLNKLAKEAFRLTEVYYPQKGFPVLDTEKMNVLLADITAADIDLRRAISEFNDWSQTAGEEPIKMNIPSQD

SEQ ID NO: 7106 - protein, 88 aa, Xenorhabdus sp.
MLTLALRLGKTLSALQRELSASELMLWLAYDRLSPLSDQRGDIQAAQIAAAVYQSQGVKVSLNEALLQWGNQDDEQQDDFEHFFAHLA

SEQ ID NO: 7107 - protein, 33 aa, Xenorhabdus sp.
VDYDEYRWEHEGRGGGQSTTWARMENRVTIWVI

SEQ ID NO: 7108 - protein, 205 aa, Xenorhabdus sp.
MLGLEFYTDNGLVQLSDKAPSLGFLRKAGEHESNVGNERYYNYAEVYGAGGKYFFAPISELSVQGNSGLEVYSEHGELMFSSAMKLLSFVRYFYVDVPNNKTRAIRHIGEKGRRYGYMRIKDQSRQHYKNVRFLDGSNNPPFYDDEWEYDVYLESFEPKYGDGSIEITYSYQYRGRESDILDPGTWRGPPPLMEGFIVDLTMIEG

SEQ ID NO: 7109 - protein, 351 aa, Xenorhabdus sp.
MDQWMTQNGAVAVTLPNGQTVSLQSIKAIQTAVDEKLDKTGGTVKGNVTTTGWMMGQDVWVKRESDGKEERVYHPFNKPTAADVGAFPVTGGEITGKVFAKSDMDVAGWVGGSQLYDRHANGGWSRAYSEAYPPNAAQIGALALTGGTVTGDIYAQEAIRVTKWVGAETLWEGKEGAWKRVWSELNSWADNSGYLRKSSPILQIHPDGKFTTNDESEGATVSKPGLGRYQVTGVLSYNADGAWGVHGGISSPKNNNGLELIYIDDKVNKDGSITIETFHRQHSHLPIRFQNKRIKEIVNGEKVYYQDGEPCDIPEGCRLDVRVQMPENSVWNVKQKAAEVTTDIDQAEQVE

SEQ ID NO: 7110 - protein, 298 aa, Xenorhabdus sp.
MSSGSKSFDAASRLFNNDTRRSTLMLYTWCRYCDDVIDSQDLGGQCLINPLENKINKLNFLKKMTNDVYLGLPMEVPAFSALQEVVTKHQIPLSQALEHLEGFAMDVRGVKYKSLNDTLDYCYHVAGVVGLMMARIMGVKEPLVLDRACDLGIAFQLTNIARDIIDDAKIGRCYLPLDWLEQEGLEPTVTSLTARENRIALSHVSNRILTAAESYYASALMGLRYLPIRSAWAIASAYKCYHKIGVKVQRAGEEAWDHRQHTSHLEKLSLLFSGGILALILRNTNIIPRSSSLWQRPK

SEQ ID NO: 7111 - protein, 35 aa, Xenorhabdus sp.
VKHWQQEHQHFFEREGSFSPEMEVVVIEFKVIDAL

SEQ ID NO: 7112 - protein, 557 aa, Xenorhabdus sp.
KQPAYRILFSLLNRSRWILLIAILASIVNGISNVFLITLVNRIVTTSGNSYHLLAVYFCIIAVLAIVSHVMSGVIFARLSQNTIARMREFISERITRAPFRQIEILGASRAQSIITDDTTNVSLLFFTLPNIVTQSSIILGCLIYLAWLSWSVFFLVLTVIVIGSLGYAIGGTSALASLKAAGKSQDRLFNHFNALFTGAKELKLHFSRAQAFFTHSLGREIGAVRQHRIRAFSVYAFGAGWMYLLFYIFLGLVIFAPAVIVGLKVTTIAGYVIVFLFILMPLDSLLNSIPSLNAARVSLNRIGYVLSELTEQDHLDEQVSASEFGEANLLQLSGITHNYYREKEDDMFQLGPIDMTLKRGEITFLIGGNGSGKTTLAKLLSGLYTPESGTITVDGNLITDSNRANYRQLFSAIFSDFHLFETLIGLTDTDSVLDARANALLAKLHLEHKVKIQDGCFSTRELSQGQRKRLALVVAYLEDRPFYLFDEWAADQDPLFKIVFYQDLLPELAARGKAVLAITHDDRFFHLADHCIKLENGQLTGQKSDIHNGVTEHQSL

SEQ ID NO: 7113 - protein, 2420 aa, Xenorhabdus sp.
NARMYKTGDLGRWLPDGNIEYLGRNDFQVKIRGFRIEPGEIEAQLVACQGVRDAVVIAHKTDKGEQRLVAYLVPQPDVTLEAADLREQLRSSLADYMLPNAFVMLDTLPLTPSGKLDRKALPAPDLSAVITRNYEAPVGDVETALTEIWQELLGLERVGRHDHFFELGGHSLIAVSLIEQLRRRGYSLEVRSIFATPLLSEMTQAIHSQQDTSDIFVPANRIPDGCTVITPDMLPLVTLSQTEINTIVATVAGGVANVQDIYPLSPLQEGLLFHHQLQENGDAYLSNSLLAFDTRSRLDTFLNALQQVIDRHDILRTAFCWQGLCKPMQVVWREAKLPVMSFVPISAENIPSQLQAHITNRLDITQAPLFTASTVYDPASEEWLLALSFHHLVCDNMTLTLIMDEIQQLLQKQTVQGQSIELTPPLLYHNFIAQTLNVPDSVHEEYFRQQLADIDEPTAPFGFLNVQGNGTDVTESRLSLDKTLAHTLRAQARCLGISASVLFHVAWAQVLAKICGQEKVVFGTVLLGRLHGSANADQMMGMLINTLPIRVSLSNFSVLEVVQATAKNLANLLEHEQAPLALAQNCSGVIPPMPLFSVLFNYRHGSSVPVEAEKTVWKGVRLLASTERTNYPITLSVDDTEDGFTLVAQSVAGADPCRLVNYLHTALSELVNTLTAEPQRPALDLSILPAAERQLLLENFNAIQADFPPDTLIHELFEQQVVRTPEAIAVMWEAETLSYGELNRQANQLAHYLIELGVKPDDRVAICVERSLDMIVGILAILKAGGAYVPFDPAYPADRLTYMLDDAEPVVLLTQTTLGEITGNSALPTVRFDDLPSSMLANLPETNPLATVQGLTPHHLAYVIYTSGSTGQPKGVMVEHTNVTRLLAATQVRFRFDNNDIWTLFHSFAFDFSVWELWGALAYGGRLVVIPAECARSPHQFYELLCREQVTVLNQTPSAFRQLIVAQNAMPHAQHTLRCIIFGGEALELHTLAPWVDRNPTDQTRLVNMYGITEITVHATYRELTEPDIYSGKGSLIGQPLDDLRIYILDAYGQPAPLGVAGELYVAGAGVARGYLNRPELTSERFLPDVFSDNPGMRMYKTGDLARWLPDGNLEYLGRNDFQVKLRGFRIELGEIEAGLMQCPGVQEAVVIAREDAEGNTRLVAYLCAEAGTELVPVDLRRQLAQHLAEYMIPSAFVMLDTFPLTPNGKLDRKALPAPDLYAVITRDYEAPIGDVEIALAQIWQELLGLERVGRHDHFFELGGHSLIAVSLIEQLRSRGYLLEVRSIFATPLLSEMAQAIQARQDSPDILVPPNRIPDDCTRIIPDMLPLVTLSHTEIDSIAATVMGGVANVQDIYPLSPLQEGILFHHQLQENSDTYLLNTLLAFDTRSRLDTFLNALQQVIDRHDILRTAFCWQGLSQPVQVVWRQAKLPVTSFVPAQSIQTQSIQAQQQAHSISRLDITQAPLFAASIALDSDSNEWLLALNFHHLVSDHMTLEFIMKEIFLLLDGKEESLPTPLPYRNFIAQILKMPNSVHESYFRERFADIEEPTAPFGLLDIQGNGANVSEARLLLNDTLAQTLRAQSRRLGISPSVLFHVAFAQMLAHISDREEVVFGTVLLGRLHGSAGADQVMGMFINTLPIRISLNNLNVWEVVRATAANLAELLEHEQAPLALAQRCSGVIPPLPLFSALFNYRYSPSELGENIGWPGIRVLQSEERTNYPITLSVDDHGNDFTLVAQTVDGINPDRIVHYLHTSLSELADALTADAQQSVLSLSILPAAERQQLLVDFNATQVDFPQHALIHELFEQQVSRTPDAIAVLFEEQTLSYEALNRQANQLAHYLMALGVKPDDRVAICVERSLEMVVGLLAILKAGGAYVPLDPAYPPERLAYMLEDAAPVALLTQTGLAGQLTYPIPTVQLDNQTSLFDIQPDHNPDATSLGLNSHHLAYVIYTSGSTGQPKGVMVTHRNVINLYTGLQSVIDITPPCRTALNASIVFDASVQSWLQLLAGHTLVIIPEAIRANTEQLWRYLAHHAVDLFDCTPVQLQWLLNAGLGTDTDYQPKLALIGGEAISPVLWSRLQQIKTSRFINVYGPTECTVDTTFCVIDHSLSSPSIGHPIANARIYLLDAYGQPVPLGVTGEIYIGGAGVVRGYLNQPELTAERFVADPFSPQLDARMYKTGDLGRWRPDGNIDYLGRNDFQIKLRGFRIEPGEIEAQLLACDGIKEAMVIVHETDNGEKRLIAYLVAQPDVTLEAANLREELKLCLPNYMLPSAFVMLDTFPLTPNGKLDRKALPAPDLSAVITSDYVEPVGDVENRLAQIWQELLGLERIGRHDSFFEIGGHSLLAARLIARIQTEFLVQIPIVSIFQSSRLSELSELILSAQMNSAWGDDSELIMKNLDSMSAEELIAILSGDTEE

SEQ ID NO: 7114 - protein, 825 aa, Xenorhabdus sp.
MSDDDRQPIGRKGQKSKYRRGRQANKRHRRDDYDDYEYNDVEDENDTDEEELMTKKGKKSPQVKKGSKWIWLLLLKILIVLAVLIGIYGFYLDGKIRHRIDGRVWQLPAAVYGRMVNLEPGMNYSKAEMIRLLEGMQYRQVTKTTRAGEFVVRGNSIEMLRRPFDFPDGKEGQIQARLTFDDNQLTSIENMENQRQFGFFRLDPKLITMMQSANGEQRLFVPRSGFPDLLVQTLLETEDRYFYEHGGIRPLSIARAALENLLAGRAVQGGSTLTQQLVKNLFLTNKRTFSRKANEALMSVLLEARYSKDRILELYLNEVFLGQSGDEEIRGFPLASIYYFGRPIDELSLDQQALLVGMVKGASYYNPWRNPKSALERRNVVLKILQNRKVINQELYDLLSARPLGVKSKSDVIAPQPAFMQMVRQELREKLGEKIDDLSGVKIFTTLDPVAQDAAENAIENGIEALRKDKNRPVPNLEGAMVVVDRFSGEVRAMVGGSQPQYPGFNRAMDARRLIGSLAKPATYLTALSEPDKYRLNTWLADEPISIPQAGGKPWEPRNFSRNFSERVMLVDALARSINIPTVNLGLDVGLDHIANTLVLLGIPAKEIQKVPAMLLGGINLTPMEMAQEFQTIASGGNRAKLSALRSIIAEDGTVVYQSYPQAERAVPAQAAYLTLYGMQQVVARGTGRSLTGKYGKYNLAGKTGTTNELRDTWFAGIDGKEVAIVWAGLDNNKPTRLTGATGALKIYERYLANETPLALDNRAPEGIVDMSVNEDGSFNCTGEGIRILPIWTDDPQALCQQSVQQPIEEGQEEAPGWLKEMFGQ

SEQ ID NO: 7115 - protein, 246 aa, Xenorhabdus sp.
MNIVILSLLFITAALLHGISGIGFPIASTTALSLFMPLKAAVVLALWPTLLVNLLSVISGGKIGSILHKYSLLALFSLVGSFIGAKLLFLVNPAYLQLLLSGIIAFYIINSIRSTNLRLSPNPVVLSLFGLVAGIIGGATNAMSPILIMCLLAMSSDRHEIARAANLCFLLGKISQLVVLRNEAFELFSSDYLWPVLLLTVLSVLFLFIGTRLRTRISAQHFRWLMLILLGVLAVMSATQAIRVLV

SEQ ID NO: 7116 - protein, 101 aa, Xenorhabdus sp.
MDEMIQFYTARLGFTCDSQFGEQYGIVSRGDTELHFWSCDDKYIAENTSCYIYVESIQEVFDELKDKVEISDIKETSWGGLEMYLFDPSGNLLKFGQTPSN

SEQ ID NO: 7117 - protein, 114 aa, Xenorhabdus sp.
MSDDAALPLQFTDAAANKVKVLVADEENPNLRLRVYITGGGCSGFQYGFTFDDQMNEGDMTIQKQGVELVVDPMSLQYLVGGCVDYTEGLEGSRFIVTNPNAKTTCGCGSSFSI

SEQ ID NO: 7118 - protein, 515 aa, Xenorhabdus sp.
MLKIDFKQKLNFQRKYKNASIHDANEEQINRQFESDRGRIINSAAIRRLQQKTQVFPLERNAAVRSRLTHSLEVQQIGRYISKTIIAELTKQNLLEKYGLSERLSAFESLIEMACLMHDIGNPPFGHFGEAAIKDWFSRRLDPDYLPETELPETGQSKRQDNCQVAALRLSGEEKKDLFRRQLRMDLCQFEGNAQAIRLAHSLLKLNLTYAQIGCILKYTCPAYRLEESPEEFSYLMKKKGYYWSEDCFIRELKKELQLGDFCRFPLTYIMEAADDISYCIADLDDAVEKGIFNVEQLVEYLKQEWKENGGHHKGDLFESTVIQAYKKTTNNEARRNIHEQFFMYLRVFITGKLVPYTAQRFIEHLPEIYAGTFNYALLEANGEEHRLLSTLKSVTRKRVFNHPEVEELELQGYRIITGLLDVYSPLLELSREDFWELHQNNFHTKYFIETRLLHKLSTKHRLAYNEAVEGIIATDEIEKDVIEFYYRARLIQDYISGMTDHYAYEEYRKFMVSK

SEQ ID NO: 7119 - protein, 447 aa, Xenorhabdus sp.
MVQFYSPNRRSVNRSIISVTADNLDAQGQGIARHQGKTIFIPGLLPGEQAQVQLTEEKRQFAKAKIVKRLSDSPFRVNPRCPHFKMCGGCQQQHVAPELQAKTKASVLEHLIQRETGISISAQPIIHSPEYGYRRRARLGLQYQARQGKLVMGFRQSQTNDLVDIGHCPVMHPELEKLLQPLSLCLNSLKVVKRLGHVELVLADNGPLVVLRHLVPIKHEDKEILRVFAKQNQVMIYLAGDETPLEPLSPEEEQSEPWYQVDGLKLVFSPQDFIQVNDAVNQKMVAQALSWLDLQPEDRVLDLFCGMGNFTLPIAAKVQAVVGVEGVAALVASGQYNARLNGLSNVNFFHENLESDIHQQPWAAQGFNKVLLDPARAGAAGVMSHIVKLAPEKVVYVSCNPTTLARDSKVLLEAGYHLVSVRMLDMFPHTGHLESMALFSREPMTIE

SEQ ID NO: 7120 - protein, 745 aa, Xenorhabdus sp.
MVAVRSAHLTPAGEFAVDKWIASLNIVNPQSSEKLAETWHYCHEKVQNHPNAELLLWRGVEMVEILSTLSMDNDSMRAALLFPLLDARLLNNETVTETFGQPIVDLVHGVLEMDAIRQLKATHTDATCSVQVDNVRRMLLAMVEDFRCVIIKLAERIAYLREVKDASEDERVLVAKECSNIYAPLANRLGIGQLKWELEDFCFRYLHPDEYKKIAKLLHERRIDREQYIEKFITTLRRYMLKEGISGEIYGRPKHIYSIWRKMQKKSLAFDELFDVRAVRIVVERLQDCYAALGIVHTHYRHLPDEFDDYVANPKPNGYQSIHTVVLGPNGKTLEIQIRTRQMHDDAELGVAAHWKYKEGTAIGGGKSGSYESRIAWLRKLIAWQQEMADTGEMLDEVRSQVFDDRVYVFTPKGDVIDLPTGSTPLDFAYHIHSDVGHRCIGAKIGGRIVPFSYQLQMGDQIEIITQKQPNPSRDWLNPNFGYVTTTRGRAKIHNWFRKQDRDKNIIAGRQMLDSELAHLGVTIKEAEKELIARYNVNSLEEVLAGIGVGDIRIHQLANFLQSKFNKTTAEEADREALRTLENKTFTQRNSKKDNGRVVVEGVGNLMHHIARCCQPIPGDDITGFITRGRGISIHRADCDQLTELEASAPERVVDAVWGESYSSGYSLVVRVLANDRSGLLRDITTILANEKVNVLGVSSRSDVKQQLATIDMNIEIYNLQVLGRVLAKLNQLPDVIEARRLHGN

SEQ ID NO: 7121 - protein, 265 aa, Xenorhabdus sp.
MTDSMKSIERLKEIMAQLRHPQHGCPWDKVQTSATIAPYTLEETYEVIDAIERNDAHALKEELGDLLFHIVFYAQMAQEEQQFDFDDICEAVCNKLERRHPHIFNQQAGISSEEAIGSWEQRKTAERAEKDQHSVLDDIPTSLPSLMKAYKIQKRCASVGFDWDTVGPVLDKVYEEIDEVMDEAKQAVVDDERVEEELGDLLFAVVNLSRHLGHKPEMALQKACQKFENRFRNVEKLILDSGLTMETATLEEMDKMWEQVKKQKA

SEQ ID NO: 7122 - protein, 236 aa, Xenorhabdus sp.
MEFSPPLKHATLIRRYKRFLADVLTPEGETLTIHCANTGAMTGCATPGDTVWYSTSDNPKRKYPNSWELTQTQDGHWICVNTHRANDLVFQAIENDLISELSGYEKISREVGYGKEKSRIDLLLESKQKVNCYIEVKSVTLLQGNNGYFPDAVTIRGQKHLRELSLIAQQGQRAVLCFAVLHSGISHVMAAKHIDHDYAFLLEQACNLGVEVICYGASMTENRMVLSHKLPFVSMG

SEQ ID NO: 7123 - protein, 92 aa, Xenorhabdus sp.
MFRGEFIGLNGGADFYAYSVDELKKEAVISLTIFLDECKKDGIKPYKNYSGKIAARLTPERHHALAITAQATGQSLNELLNEGVDLVIEKHS

SEQ ID NO: 7124 - protein, 427 aa, Xenorhabdus sp.
MSQSETLYSQAKHVIPGGVNSPVRAFNGVGGTPVFIQRANGAYLYDVDGHAYIDYVGSWGPMVLGHNHPAIRNAVIEAAERGLSFGAPTAAEVEMAKLVTELIPSMDMVRMVNSGTEATMSAIRLARGYTQRDKIIKFEGCYHGHADCLLVKAGSGALTIGQPNSPGVPADFAKHTLTCVYNDLNSVREAFEKFPEEIACIIVEPVAGNMNCIPPQPEFLPGLRKLCDEFGALLIIDEVMTGFRVALGGAQEYYGVKPDLTSLGKIIGGGMPVGAFGGRQEIMEKLAPTGPVYQAGTLSGNPIAMAAGLACLKEVAQIGVHQRLSELTDKLATGLKNAAAKADIPLVINHVGGMFGIFFTDAENVTCYQDVMKCDVERFKKFFHFMLDEGVYLAPSAFEAGFMSIAHSEEDIQRTVDAAARCFAKLK

SEQ ID NO: 7125 - protein, 92 aa, Xenorhabdus sp.
MRLIDNYIPPSIDSLTCLKSKLRFTGQQMAELAGISNSNQWRKYTGGEKPRALNQHILFFIAAQLALDETTLSIILDEMHKLGAEFEKKPEN

SEQ ID NO: 7126 - protein, 89 aa, Xenorhabdus sp.
MSALTMSTHNAIKALKESGMDETQAEKIVEIITDLQNISVATKEDIKQTEANLKADLTAIKTDIDWLKKLIITIGVAVVIAAIKYIFIG

SEQ ID NO: 7127 - protein, 259 aa, Xenorhabdus sp.
APLYAAASRVISLAPSTTELAYTAGMGDQLVAVSAYSDYPEAAKKLEQVADWQGINVERIIALKPDLILAWRGGNPQRPLEQLAALGIPIFYSDVKKVEDVATDLERLAAYSSHPDTAKKAAADIRQKFSQLKQTYAKANPTPVFIQFGINPIFTSSSHTIQSEIVSACGGRNIFADSPVPWPQVNREQVLVRKPEVIVMGGTEDQKQRVAEFWQPQLNVRIVTINDDWFSRAGPRIILATEQLCIQLNNIGQAIKTLR

SEQ ID NO: 7128 - protein, 232 aa, Xenorhabdus sp.
MKVGVIGAMEQEVTLLRDQIEGLQTLSRGGCEIYTGKLNGVDIALLKSGIGKVSSALGTTLLIEHCQPDIVINTGSAGGLDPKLKVGDIVVSEEVRYHDADLTAFGYEPGQMAQCPAAFIADEKLITLAEKCIQSLELNAVRGLVCSGDAFINGSEPLARIRATFPNVAAVEMEAAAIGHVCHQYKVPFVVVRAISDVADQESHISFDEFLVVAAQESTRMINAMLTELSKQ

SEQ ID NO: 7129 - protein, 785 aa, Xenorhabdus sp.
MTKYSLRTRMMSLILVPVLLVGTLVSISFISYRYYELKSLIVRSGISIIEPLSIASKVGINLDNSKGVKSLINRLHRRNFEIVMAIAIFDEHHQLFEISNDKYDVNLLRLRPNDPIPTTLTKEEDSNSIILKMPIISESSASNGWPETPHKPVPIGYIAIDLDLRAAQLQQYKEIATSIILLILCLGGTALFAHILVRKVTEPLECMVKAVNRIRQGQLNTRVTGAMPGELSALQNGINTVAESLSKYKDEMQLHIDQATSDLQITMEQLEIQNVELTIAKKRAQEAVRIKTEFLANMSHELRTPLNGVIGFTRQMLKTPITYQQAEYLHVIERSANNLLKIINDILDFSRLESNKLILDQIPFLLRDTVNEVIELLTPSASAKNLPLHHYIDDQLPNLMIGDPIRLQQILTNLIGNAIKFTDEGNITLEIKLRQQKHHMVQIDFTVTDTGIGIKSEYRPILFQAFNQADASITRHYGGTGLGLSITKRLVNEMDGEIDFISEPTRGTVFYFDIWLEKEEFLLDSVPAHLSQPHSSFRLPMTVMAVDDNPANLKLIGTLLSEQVDNTILCSSGMEALKMAKKHSLDLILMDIQMADMDGIQTSEQIHQLPEHKQTPIVAVTAFICDETCNQGHSPFIDCLSKPLDEARLKDLLHQYSPTKKPQAIDWKLALQQTAGKESLALEMLAMLVQSLPEMKTRIEQALTVEGEAHRKQFLHHVHQLHGSCCYNGVPKLKMVCELIEKQLKQNISLADLEPELLEFIDEIDHVIAAAPDILRATRALTSIP

SEQ ID NO: 7130 - protein, 323 aa, Xenorhabdus sp.
MNLESIIKLTADDMAAVNETILNQLNSDVALINQLGYYIISGGGKRIRPMIAVLVAKALGHEGEKHIKVAALIEFIHTATLLHDDVVDESDMRRGRATANAMYGNAAGVLVGDFIYTRSFQMMTDLNSMRVLKLMSDATNVIAEGEVMQLMNCNDPDISEDDYMRVIYSKTARLFEVASHSSAILSNATPEQEAALRDYGRYLGTAFQLIDDLLDYDSDDNTLGKNTGDDLNEGKPTLPLLHAMNHGTPEQSALIREAIEKGNGRHLLDTVLTTMKQCGSLNYTRQRAEEEADKAISALQVLDESPYKAALVGLAHIAVQRLS

SEQ ID NO: 7131 - protein, 156 aa, Xenorhabdus sp.
MRIPSKQEDLVKAFKALLKEEKFSSQGEIVAALQEEGFENINQSKVSRMLTKFGAVRTRNAKMEMVYCLPAELGVPTATSPLKNLVLDVDYNHSVVVIRTSPGAAQLIARLLDSLGKAEGILGSIAGDDTVFSTPTKAVTTAQLYEAILNLFDQEL

SEQ ID NO: 7132 - protein, 334 aa, Xenorhabdus sp.
MKTLGEFIVEKQHDFPHATGELTALLSAIKLGAKIIHRDINKAGLVDILGTSGVSNVQGEVQMKLDLYANEKLKAALKARGEVAGIASEEEDDIVIFDGDRAENAKYVVLMDPLDGSSNIDVNVSVGTIFSIYHRITPIGQPVTEEDFLQPGHRQVAAGYVVYGSSTMLVYTTGCGVHTFTYDPSLGVFCLTHEKVQFPAKGNMYSINEGNYIKFPQGVKKYIKYCQEQDEETQRPYTTRYVGSLVADFHRNLLKGGIYIYPSTASHPTGKLRLLYECNPIAFLAEQAGGKASDGTNRILDIVPNQLHQRVPLFVGTKSMVEKAESFMAEFPEE

SEQ ID NO: 7133 - protein, 176 aa, Xenorhabdus sp.
MSLNNVPAGKELPEDIYVIIEIPANADPIKYEVDKDSGALFVDRFMSTAMFYPCNYGYINNTLSLDGDPVDVLVPTPYPLQPGSVIRCRPVGMLKMTDESGEDAKLIAVPHTKLSKEYDHIKDVNDLPELLRSQITHFFEHYKDLEKGKWVKVDGWENVEAAKAEILTSFERAAKK

SEQ ID NO: 7134 - protein, 210 aa, Xenorhabdus sp.
NESQHVSEQSALPGRELPLTVSPYHYVTQHAIDNIPENMEIAYVGMGCFWGVERLFWQQEGVYTTSAGYSGGITPNPTYEEVCSGLTGHAEVVRIVFDPTKITYSQLLKLFWENHDPAQGMRQHGDIGTQYRSALYTVSPEQYAQAVASLEQYQLAMDENGDQRTITTAIRAAGPFYFAEDYHQQYLMKNPEGYCGLGGTGICFPPTSRN

SEQ ID NO: 7135 - protein, 442 aa, Xenorhabdus sp.
MLNSLLIILLLCAISAFFSLSEISLAASRRIKLKLMVNEGNINAARVLKLQETPGRFFTVVQIGLNAVAILAGVVGESAFSPAIKSLLTRFMPHDWAEQLGFICSFIIVTSLFILLADLTPKRLGMIKPEAVAIRIVNPMRFCLAISRPLVWLFNGLADCIFKIFKIPMARNEDITSDDIYAVVEAGAVAGVLRKQEHELIENVFELESRTVPSAMTSRESVVYFDKNEDENSIKEKISTHPHSKFLVCDGDIDHVMGYVDSKDLLNRVLSGQSLNLKNGVQIRNALMIPDTLSLSDTLESFKAAGDDFAIILNEYALVMGVITLNDVMTTLMGDLIGQGQEEQIVVRDENSWLVEGGTPIEDVLRVLDIEDFPDSSNYETIAGFMMFRLRKIPKRTDYVKFSGYKFEVVDIDNYKIDQLLVTKIVDTPPPSSSPTESAISE

SEQ ID NO: 7136 - protein, 180 aa, Xenorhabdus sp.
VLALILSLTSITAFAHNITVGQPVPAVIIADKGELLLNNGKFSYQQWSSAELPGKVRTIQHIAGRSSAKEMNDPLIQALKAADLPKDKYQTTSVVNTDDAIFGTSAFVRSSLEDSKKEFPWSQFIVDSDGVAKQAWGLEPKSSAIIVLDKNGIVQFVKDGKLNNEDIKHVLALIKEELKN

SEQ ID NO: 7137 - protein, 85 aa, Xenorhabdus sp.
MAAVVIRQSGGANIVSIPKAIVKTLNLHTGSKLELSIQDNRIVLTPIEEELTLESLLAGSPKECFTITEEDKEWLNSKPVGKEIL

SEQ ID NO: 7138 - protein, 103 aa, Xenorhabdus sp.
MARREGWEQRRKRGVQGKALEYHVNSLPEDVLNVLAVSESSVEYYRNKRQDPFMIWVEAYYQLTKPERERMVKFILRKGLASLVQYTGIQEFENKGSISDCSV

SEQ ID NO: 7139 - protein, 312 aa, Xenorhabdus sp.
MKVAVLGAAGGIGQALALLLKTQLPSGSELSLYDIAPVTPGVAADLSHIPTAVKVTGFAGEDATPALAGADVVLISAGVARKPGMDRSDLFNINAGIIRNLVQQIAKTCPKALIGIITNPVNTTVAIAAEVLKKEGVYDKNRLFGITTLDIIRSNTFIAELKGKKPEELEVPVIGGHSGVTILPLLSQIPGVSFTAEEVEALTKRIQNAGTEVVEAKAGGGSATLSMGQAAARFGLSLIRALQGDSNVIECSYVEGDGEHARFFAQPIRLGKNGIEERLDIGQLSEFEQNALNNMLDVLKKDIELGEKFING

SEQ ID NO: 7140 - protein, 456 aa, Xenorhabdus sp.
MRIHILGICGTFMGGLAILARSLGHEVTGSDANVYPPMSTLLENQGIELIQGYDPSQLNPVPDMVIIGNAMTRGNPCVEAVLDRGIPYTSGPQWLHDHVLPERWVLAVAGTHGKTTTAGMLAWILEACGYKPGFLIGGVPGNFEVSAQLGESPFFVIEADEYDCAFFDKRSKFVHYSPRTLVMNNLEFDHADIFENLAAIQKQFHHLVRVVPGTGKILAPDHDINLKQVIGMGCWSELEYTGETGSWQAKKTTQDSSTYQVFHHGELVGKVSWSLVGEHNMHNGLMAIAAAYHVGVQPADACQVLSDFINARRRLELVGEVNGISIYDDFAHHPTAILATLEALRSKAGGMARILAVLEPRSNTMKLGMSKNEIAPSLGRADEVFLFQPGNIPWQVAEIAEQCIQPARWCSDIDALVRMIVESAQPGDHILIMSNGGFGGIHEKLLAALNKKEQAA

SEQ ID NO: 7141 - protein, 97 aa, Xenorhabdus sp.
MTYAQLLGEHRLEGYEIYDLGHYPAVVRGEGTLECEVYRITSSILTELDDLKKNTQEYQRELIKTPYGSAWIYLYMLSVEGLTRIESGDWLKRHEEK

SEQ ID NO: 7142 - protein, 1231 aa, Xenorhabdus sp.
VGLVTTQTGLHFMINSATRLVPGLEIASVSGGWRDLTLKGIKYKMPGIDVNADNFHLSLRLSCLHRSHICANALTTEGVSVLVNTAELPPSEKSPDSEPLTELKTPYPIELDLLSLKNIHVKVDDIAIDLGEFNAGAQWQEKHLTLKPIQISNLLVALPKKPIEPTEQKPRPKTESEQSLGEVLKTLFAKPLLADLPAVPIPLDITVENIHGRQLRLAGDTDITINDVELKASNQGQDVEIKNFSVSAPEGSLVIQGTAKLAEQWPVKLSIKGSTTLEPVKGQHFQAKLDGALLQQLNLALKLAGPVDADLNVQTELAKANLPMRLTLVSKHLQWPLTEKAEYQLNDVRLHLNGKASDYDLSLRSDIKGNELPPALLVLDAKGNEELLRLTRLRLSALQGNADLTGVVDWSKAISWNAQLQLHGIDTEKQWPEWPARIDGKVAVRGSLYGGSWQLQLPEIALDGHVKQNSIKMHGKVSGNAAGQWDIPQFNVIFGRNTLDVKGRLTDEKWELDGDIHAPQLNGLLPGLSGVVMGDLKLRGNLKAPQVVADLNARGVRWQNDLSVDSAVIKGDLRSTDQIEGRLSVIIQQLKQADLAINNLELNAKGTERQHDLQLRVDGSPVSGHLALNGSFDRKQERWKGNINNTYFDTPVGEWRLSKAVTFDYQNLQQKVIVGTHCWLNPNAQLCIPKPIEAGSSGQADIVLERFDLAMIQPYLDKTTQLKGIFSGNANVKWMEGHQLPQVKMALEGDGVQLRQVVEGSTLPVDFERLTLNAGLKNGKVDLSWLFKLVGNGQLDGHVQIDDLDGRRKLSGNVDARFLSLNLIKPILDKGEKADGTLNANLNLGGSAKNPLLYGFLKADVFQVNSHWLPFDINQSQLSVYFDGVRSDLEGIIKTPQGQLNLHGNADWRNLNAWSARVTAYGDKLRVTVPPMVKIDVSPDLVFEATPHLLKLNGNVGIPWARITVQELPESAVGISSDEVMLDKNLQPIEKKKSSILIQSDLNIHIGNDVRLNAFGLNAQLKGNLKVIQDQQGLALNGQIDIPDGQFRAYGQDLQVRKGLIMFSGPPDQPLLNIEAIRNPESTANNVIAGVRVMGLADKPKIEIFSEPVKSQQEALSYLLRGEGLEKGGSDNSQMTSMLIGLGVAQSGKLVGKIGETFGVSDLALDTQGIGDKSQVVVSGKITNDLQVKYGVGIFDSLATLTLRYRVMPRLYLEAVSGIDQALDLLYEFEF

SEQ ID NO: 7143 - protein, 570 aa, Xenorhabdus sp.
CVSIATPSVYSANLRLKVEGLSGELEKNARVQLSNISTDEVSPDGRFRARVEKAIRKGLRPLGYYEPTIEFTYQENTPPSRPVLTAKVTLGEPVRIAGVKVDLEGGARTDPDYAAMIKKNMPKDGTILNHGEYESFKSALNNLALRKGYFDAEMKKSELEVSKERHVSYWDFDFDSGQRYRFGPVKFQGSQIRENYLNNLVPFKEGDYYSSEELAELNRRLADTGWFNSAVVVPDFKTGRESKDKILPLDASLVPRSANYVELGGGYATDVGPRVQVKWKKPWLNSRGHSLSTSINVSRRDQVIDASYKMPLKANPLEQYYELQTGYKRKELNDTTSDTATLNLSRNWDLSTGWRYGVNLRWSLSHFTQANVTNTTALLYPGANVSRIRQRGGTMPYWGDSQRYSIDISDTTWHSDVDFMVLQAHHVWVRTLRDKHRFVVRGDLGWIETNQFERVPPDLRFFAGGDRSIRGYKYQKISPKDSDGKLTGASKLVIGSLEYQYNVHGNWWGAMFVDTGEAVNDIKRSNFKTGAGIGVRWASPVGPIKFDLASPVGDKNNHEVQFYIGLGAEL

SEQ ID NO: 7144 - protein, 246 aa, Xenorhabdus sp.
MLQQICQLAREAGAAIMSVYHDEQPMQIKHKTDDSPVTAADIAAHKIIKAGLTRISPDIPLISEEDPPTWDERKNWRRYWLVDPLDGTKEFINRNGEFTVNIALIEEGVPVMGVVYVPVRDVLYSGHERHAWKETNGQKFPIKVVSATPPTVVVSRSHMDDELRDYLTQLGAHQTLSVGSSLKFCMVAEGKAQLYPRFGPTNIWDTAAGHAVALAAGGHVTDWAGKTLDYTPRESFLNPGFRVTIF

SEQ ID NO: 7145 - protein, 220 aa, Xenorhabdus sp.
LLCLSLYLSNKGNFMTKPSFESIEARASYGIGLQVGQQLQESGLQGLEPEALLAGLCDALESRAPALPVEELHRALREVHERADGVRRERQQAMAEEGKKFLAENVQREGVSSTESGLQFSVLTQGDGAIPARSDRVRVHYTGRLIDGTVFDSSVQRGTPAEFPVSGVIPGWIEALTLMPVGSKWELYIPHNLAYGERGAGASIPPYSTLIFEVELLEIL

SEQ ID NO: 7146 - protein, 31 aa, Xenorhabdus sp.
MSIQVQAHSAVLLHFTLKLDDGSTADSTFRA

SEQ ID NO: 7147 - protein, 59 aa, Xenorhabdus sp.
VRTFIKKVYAAIAAGDKEAAQNAFNDMQPIVDRHACKGLIHKNKAARHKSALAAQIKAM

SEQ ID NO: 7148 - protein, 281 aa, Xenorhabdus sp.
METLVLFAVLGAALLHASWNAVIKVSADRFLGIALIAFFSGLISTLGLFWVGLPTISSLPWLILSCVLQIGYCLFLSRSYEMGDLNQIYPIARGCAPLITALLSWVILQETLPPLAMLGVGLIIVGVIFIAFPYGKKSLRLDRRALIAAMTTSVFTACYTLVDGVGARASDNALTYILWLFAVYGWVMGGMMYFKYRNTVRQSIRQYWKPGLLGGFMQLVSYGIAIWAMSHVPIVLVAALRETSILFAMLLSVFILREPFSKMRLLACVVIVSGVVGMKLG

SEQ ID NO: 7149 - protein, 190 aa, Xenorhabdus sp.
MSSNQLANPGPLGLMGFGMTTILLNLHNADFFPLTSVILSMGIFYGGLAQVLAGIIEYKKGNTFGATAFTSYGMFWLSLIGVLFLPKMDLAEATSPEFLGVYLALWGIFTLFMFFGTLKANRTLQFIFGSLTVLFALLAIGNITGNASLLTFAGFEGVICGASAFYLAMAEVLNEQYGRTILPIGEKKHA

SEQ ID NO: 7150 - protein, 101 aa, Xenorhabdus sp.
VEIIEGHLMPAHVHMLVSIPPKLSVSSFMGYLKGKSSLMIFDRHANLKYKFGNRKFWAEGFYVSTVGLNEATIQKYIREQEKSDLISDKLSSKEHVDPFKG

SEQ ID NO: 7151 - protein, 592 aa, Xenorhabdus sp.
VTLFNRKTKQKNPSLATMGVTYTPIPLITMGVDYKQGERGQSETQFLTNFNFRLGVPLSAQLSPDNVASMRTLAGSRYDLVERNNNIVLDHKKIETIELIALPPIIGYGHQEIAISAPLRSFKNINNISWKVVDKEFEKYNGKLSAKSGKNITVTLPSYQDTHKQDYTLDIAITDNQGITKNTQVPVRILPFLIKGTVNITPPKHPEATGKEENGYTFDAPVITYQDSLDGAFVKNGKIDNVSWTTEPALGEESKLKFRWNNKSAQTNEKGELTDSSGKLLTNVLVSKIPKDNVDIYIQLDGAPRQKLGSVKFSDYKIENNQLNVTPDPKKALIADGKNKYKYTAKIITDNNLPVDTVNNVKWSAVGKNAKGHEVKDIFVDGPTGTVKTNKGVLEATLSSLIPLNDVVVTLSIENNQSVSAKAVSFIAGTKGYHVEKIRIDKPSPLIVNDTYTYTAYIVDQDGKPAPEGQVISNVRWNINNNMSEITFTHKDGKDTTGLGGTLTASLKSTVSVNGVEVSLAVEDQITPIHATAVSFNDDPKFNHVKNITVGFRRRTPKSDDSAVMTSRMPVLSVVPTAQPVQQHQWMFCSPS

SEQ ID NO: 7152 - protein, 158 aa, Xenorhabdus sp.
VVLILDLGSKQLVLQNFSLYESIPLIPYFNLAYAQNFGAAFSFLADKGGWQRWFFALIAIAICITLLVMMYRSSAKQKLSNIAYALVIGGALGNLFDRLVHGFVVDFIDFYVGEWHWPTFNIADSAICIGAALIIIESFTNPGDKKASSKEQSSKNSH

SEQ ID NO: 7153 - protein, 937 aa, Xenorhabdus sp.
MSDYKDTLNLPETGFPMRGDLAKREPDMLKRWYKEGLYQAIRKAKSGKKSFILHDGPPYANGDIHIGHSVNKILKDIVVKSKGLSGYDSPYIPGWDCHGLPIELKVEQIIGKPGEKFSAAEFRAECRKYAMTQVETQKAGFKRLGVLGDWDKPYLTMDFKTEADIIRALGRIIGNGHLLKGVKPVHWCTDCGSSLAEAEVEYYDKTSPSIDVRFTAVDAQAVYTKFGVQPQNLPVSLVIWTTTPWTLPANRAIALGAEITYQLVKVNDECLILAAELVEFVMQRAGITSWEVMSDCTGADLELMRFNHPFMGFESPAILGDHVTLDAGTGAVHTAGGHGPDDYTISLKYGLEIANPVGPNGCYISGTYPSLDGQFVFKANDIIVEMLQEKGALLSLAKIQHSYPCCWRHKKPIIFRATPQWFISMDQKGLREQSLKEIKGVEWIPGWGQARIESMVENRPDWCISRQRTWGVPMSLFLHKETQELHPRTPELIEEVAKRVEVDGIQAWWDLDMSELLGDEAADYMKAQDTLDVWFDSGSTCSSVVDARPEFNGHSADIYLEGSDQHRGWFMSSLMISTAIKGKAPYRQVLTHGFTVDEHGRKMSKSIGNTVSPQDVMNKLGADILRLWVASTDYSGEIAVSDEILKRSADAYRRIRNTARFLLANLNGFDPEQHMVKAEDMVTLDRWAVGRAQAAQADILKHYDEYDFHAVVQRLMQFCSVEMGSFYLDIIKDRQYTAKSDSVARRSCQSALYHIAEALVRWMAPILSFTADEIWNELPGKRAQFVLTEEWYDGLFGLADSEDMNDTFWAELLEIRSEVNKVLEQARADKHIRSSLEASVTLYADEALAGTLNKLSDELRFVLLTSQAEVAAYDTAGDDAQQSELQGLKIAFRKADGEKCPRCWHYAKDLGLVAEHAELCGRCVTNVAGNGEERKFA

SEQ ID NO: 7154 - protein, 310 aa, Xenorhabdus sp.
MELIRGIHNIRARHHGCVLTIGNFDGVHRGHQALLKHLKQEGLRLGLPTMVMIFEPQPLEVFVADKAPARLTRLRDKIKYLSQYGVDYLLCVKFDRNFAANSPEAFVSRLLVEKLGVKFLAVGDDFRFGKNRLGDFHYLQQAGKQYGFDVASTDSFCDSGLRISSTAIRQSLQHDDLTLAETLLGHPYSISGRVVHGNRLGRTIGFPTANLPLKRLVAPVKGVYAVEVYGLGDTPLPGVANIGNRPTVSGQGQQLEVHLIDTQMDLYGRHIDVVLRKKLRDEQRFASLDALKQQIANDVVSAREYFLQRS

SEQ ID NO: 7155 - protein, 394 aa, Xenorhabdus sp.
MTAIIRQFLKLEAAGGILLIIAAIIALVMANTPLQTIYHQFLNLPVAVQFAALEINKPLLLWINDGLMAVFFLIVGLEVKRELMEGSLASRDKAIFPAIAAVGGMLAPALIYLLFNGNDEITRQGWAIPAATDIAFALGVMALLGNRVPTALKVFLLALAIIDDLGVIIIIALFYTKSVSMVALGLAAAMIGLLVWMNWRGVAKTSAYLVVGVILWVCILKSGVHATLAGVIVGFLIPLRCKNGHSPSEALEHGLHPWVAYLILPLFAFANAGISLQGVSLEGLSGMLPVGVALGLFIGKPLGIFLISWLSVKLGVAKLPAGIGMQQIFAVSVLCGIGFTMSIFISGLAFEGLSEDFSTYSRLGILIGSTTAAVIGYGLLNKLLPKKVLAKKKI

SEQ ID NO: 7156 - protein, 385 aa, Xenorhabdus sp.
VLGVNNTMAKKDYYEVLGVSKTADEKEIKKAYKRLAMKFHPDRNQGDKEAEAKFKEIKEAYEILTDSQKRAAYDQYGHAAFEQGGMGGGAGGFGGGADFSDIFGDVFGDIFGGGRRQQRPSRGSDLRYSMDLTLEEAVRGVTKEIRIPTLESCESCHGSGAKAGTSPETCSTCQGAGQVHMRQGFFTVQQPCPQCHGRGKIIKEPCNKCHGHGRVEKYKTLSVKIPAGVDTGDRIRLSGEGEAGEHGAPAGDLYVQVQVKAHHIFERDGSNLYCEVPINFATAALGGEIEVPTLDGRVSLKIPAETQTGKLFRMKGKGVKSVRGGAQGDLLCRVVVETPVKLNEEQKELMRQLGESFGGKSGETNSPRSKSFLDGVKKFFDDLTK

SEQ ID NO: 7157 - protein, 637 aa, Xenorhabdus sp.
MGKIIGIDLGTTNSCVAIMDGTTARVLENSEGDRTTPSIIAYTQDGETLVGQPAKRQAVTNPQNTLFAIKRLIGRRFQDEEVQRDVAIMPYKITNADNGDAWLEVKGQKMAPPQISAEVLKKMKKTAEDYLGEPVTEAVITVPAYFNDAQRQATKDAGRIAGLEVKRIINEPTAAALAYGLDKEVGNRTIAVYDLGGGTFDISIIEIDEVDGEKTYEVLATNGDTHLGGEDFDSRMINYLVDEFKKEQGIDLRNDPLAMQRLKEAAEKAKIELSSAQQTDVNLPYITADATGPKHMNVKVTRAKLESLVEDLVKRSIEPLKVALNDAGLSVSDIQDVILVGGQTRMPMVQKAVADFFGKEPRKDVNPDEAVAMGAAVQGGVLAGDVKDVLLLDVTPLSLGIETMGGVMTSLITKNTTIPTKHSQVFSTAEDNQSAVTIHVLQGERKRSGDNKSLGQFNLDGIQPAPRGMPQIEVTFDIDADGILHVSAKDKNSGREQNITIKASSGLNEEEIQQMVRDAEANAEADRKFEELVQTRNQADQLVHGTRKQVEEAGDKLTADEKTAIEKAVAELETAAKGEDKAEIEAKIQALVEASKKLQEIAQQQAQAGAADADAGNAAKKDDDAVDAEFEEVKDKK

SEQ ID NO: 7158 - protein, 43 aa, Xenorhabdus sp.
CTRAIKPGEPERAGRWWWENDEKRECGLHVAGAEQTSAVSAIP

SEQ ID NO: 7159 - protein, 97 aa, Xenorhabdus sp.
CALQALHLSIAEAGRNPYFTSLFKRLLDEGRRILRLYYQSYEDRLPRRFVDDHEAMIAAIAARDIALSEKLAREHAEQIVQQVQKLLVRNERLEINL

SEQ ID NO: 7160 - protein, 31 aa, Xenorhabdus sp.
MECVERLVKARIPVIVGTGAVNTASAVAHAA

SEQ ID NO: 7161 - protein, 309 aa, Xenorhabdus sp.
TEDEILRQPRLLENAIVSFIYEQNDNLEKLLNLYKRSHSQDPYLILWAEAKILMKKREYQEAINKLEQFVKKYDNPTAKFDLAILYLLNKRYNESEKVFNDLLLLTRNEQEKKILNDYIKHIEKGKEVKFDMGFSFKIDSNITRITDKRTYTGLHDNIRKKDVGFSYNPSMRKKYYFDSGLFSEFDIDVYGINYRKEERFNQFNARIGNKFGFEDYSNYLYFKPFYMKAFYGGGGSSKEASLKPYYDAIGFDLFKLSSLNDNFKYSIFYENRNDYYSKRKELNGDVNFVSSSLIFIPFNDLYMSLSGSY

SEQ ID NO: 7162 - protein, 53 aa, Xenorhabdus sp.
MEVIRADGLIALDSYPFKEASLHRPDYVVALVTTPDAPDGNCLLSLWGYHWYR

SEQ ID NO: 7163 - protein, 106 aa, Xenorhabdus sp.
MSEKFVQTISSVNYNKGVFSLYFVGPEPNKMANGVLAENDQELELKQVIHMPASGFMYMVSMVKNMLEDPRMEAEINKLMTAGFLAVPAEVAGPSDTTTPSNTESK

SEQ ID NO: 7164 - protein, 1553 aa, Xenorhabdus sp.
MGAGGYNQITRKGTDDNFGGEGMAYAKAEEMVLMSATLAGNWIQNHQKVTAVKSARETNTHLFALVDGNVTKVNKIHLSNDPQTGRLKYFTTSWFKEGNHLNNLASHDISERNGFQIINLDNAYTLSGLKAEYHQAFTIHAMEKELPENEWVTYADGVQIAAENITLSDARMGGYAISTDGSTVDVKPVKSNRMENTYLYARVLGEYTKVVVVQLKNDPETGKLKYIATPWYKAGDQTAVMADQFIGPNYGYSSLGKGSYTLSDVHYSVNTVRVTSGTIADVSSAREQALFTSDIKKNDGSGDVRFEGAGGGNVIKSNVARGNVYFKGAGLANVILHNSEMGDTEFRGAGAANVIFKKGKKGHLNFNGGGIANVITHISTSHLTSDSSPSDLPKTDDSQSRVIALGGANVLTRKGHGRVFSVMGGGANVLTHLGNGETTGVMMGGANVLTKVGDGDTTGIMLGLGNVLTHVGNGRTLGTMGAVGNIFTKVGDGETIAAMLAVGNIFTYIGDGEVCAMMAGGGNVFTKVGNGNALALMVALGNVFTHVGDGLSVALMVAKGNLATKVGSGESLAAMIGVGNVMTHIGNGNTFAAMVGEANIFTKAGNELTAAVMIGKANIYTHVGQGTSLGLFAGNANIMTKVGDGTTLAAMFGQANVMTHAGSGLTGVLALGEANVVTKVGHEFMGVLAAAKSNVITHVGHGVTAGVLLGKGNMLTKVGNGATVGLLVSKFGNIMTHVGDGNTVGFAKGTLNLMTKMGDGLAVNAAWGDANIMTHVGAGDHYNFARGKANLVTKIGDGRAVSVVQGSANILTHLGRGDDYTGAWGKANVITKVGNGRQVTLAKGDANIVTHVGQGDSFNALWSQSNVVTKVGDGMQVTAAKGKSNITTSVGNGLSVVAAHGDLNVNTKVGDGISVNVAWGKLNVSTKVGDGLNVSVMKGTGNANIHVGDGMNIHASYARNNVAIQIGNGDFYNLALASSNTESHKLATLFGNIKQTLLGAMGSQGINFLVQGDEAHTSGSYRGRGAINLPEINSLKGFELTEIGEVSSTLSADLHASVSQLKTPDVGRLESIMNGEEQPTKNQKPNLIINGDFEAGTQGWQATNGIEAQHPAASYGLDDAGHGSHVTELDAHANTTIYQDLHQLKAGEVITLDFDFALRAGSTDDNGIEVLWNDQVVFSASDDRIAWRHKQLVLIAQAGSNRLAFSGTGRSDGRGYILDNIVACSNRSGSVKVKQTPQTSVAGEVLDDKENAEADSERLMQERDQQLAAIADTQNQLEATDLDALNTNGLAQRDVIRQEEQAITDDLLAKAKALESLDNLPNRHHQGDSGTQWRHDYAAGCWMISSHNWIKQKILPSSNWSLQIHLFCNTRIKSIRLWKNQKRVLSEVNRINGMRSRILQMPATGQNSGRKRHSHSRNGLHRLPLMDITLPSRQSRMLQSKRKTAARKPPAEKTRGVVYSARLMNQMVQNISAAILLRIYLCRVRGVSGWTSRSQTIVWCHWLMQNRRWTVYKLKQALFPERQILCLPGSQMSSPAISLCLMRLIGKLMRLKP

SEQ ID NO: 7165 - protein, 647 aa, Xenorhabdus sp.
VPLADAKQALDRLQIKASIISRKTNIVPTRQPDEQPRNIALPDEVNREIDASETLSRALPDISATVTDKLEALGNERLVGDYGLPQNRLTPSNSASLSTITARAQKVADIYRWLDSDTERLMDFSADDYIPVPGIARIDTEFYESNRQKMIDYIEGHLNSIKHTIPRAQVSSLAKLFVESTIDYDWDKRVRFMAQLEQYGYHFDPADGEQSVVTLRSGNNSQQYRELLNAAQPNGKKVVYDTDLPGHAFSNTLSERLLDWASHSLDPHDIRQKEQQSAIEASVRSNMGLWSSVYATKARGDVYVIAEGGLLLGSTFWNLELPVLRQLQREGMVGEIRLLDKPASEYKHLPLKQIGSRLNDNDIGMKVRFDALNPVEQQKYREINADHYQPDTLVDLNVRLGAIDSMLNKALPFYRLRSELNILIREGADNTFEVHSWPENRHSPIKMIKVENPKDPAQLKVIEQFILANYESYDQFPKELHFIENNIVSYDQRRTRILAEKINGRWSYRPSAELMSADELQQKAYIKGKPMGESYRNVIDALQRYEQALMEDRDYSLDAIEKLTYLCQQVEGYVLGHADSKRTPAMQQLLSQIYGRLSESMTLAEPTLRSSGEGSFSELYNKLSNSKLSDSKHLYIDTQGDFVTQGL

SEQ ID NO: 7166 - protein, 220 aa, Xenorhabdus sp.
VAEDLVGNDVGNNVWFAASGDYVKGTAQSENQKYWGQNTQAPGKYYYIQLGPTGESIAIGQDPDKPTYKLFKNKARNATLGHKDPHVFLASPWMAPNPKGDGLVTYNGPVVFQQAKDNTRHDLTMTLDVNKQSNDVTFGGSIQHNGSAVANLASETQKSTWGNHMFFGSTPFTATDYKFSFFQGKKIVWGFTDKEATGVSGIIGKVGDNNEFGAFLLDKQ

SEQ ID NO: 7167 - protein, 270 aa, Xenorhabdus sp.
MLEIALEAVNTIKKRTQDAFDGAGQFDYKPDRSVVTQTDLMLETEIRNILEKRSPGVPILGEEFGLDGSDKFESGWIIDPIDGTRAFLYGVPLFSTLLAFVENGEPKLGVISFPAISTVVYASQGEGCWMSVEGKPLRQLKVMDNSPTSVNNAVIAASGIHGSGYHLENGTVVYDLDGVVKSARDFVFVNDCYQHTMVAAGRLHCAIDTIMKPWDSAAILPCIKEAGGDFCALDGSRKRAMFGGSLVSACNSALLDQVVEIMNSRADTKN

SEQ ID NO: 7168 - protein, 177 aa, Xenorhabdus sp.
MKTIEVDEDLYRFIASQTLHIGESASDILRRILKLDAGQPVQTTQPASEPVPVNKIPAVRPRDTVRVIRELLLSDEYAEKKKSVERFMLVLSTLYSLDSESFARTTEAMHGRTRTYFAGDEHTLLASGKQTKPRHIPGTPFWVITNTNTDRKRSMIEQVMQDMSLPVNLIEKVCGTI

SEQ ID NO: 7169 - protein, 547 aa, Xenorhabdus sp.
VAIHPRAGQLAQQHDLINVALLTSQYYTLQPNPENPAHKVKFGTSGHRGSAGRNSFNEAHILAISQAIVEVRKQYDITGPCYIGKDTHALSEAAFISVLEVLTANGVDVVVQENNGFTPTPAISHAILSYNRQGKNLADGIVITPSHNPPEDGGIKYNPPNGGPADTDLTSVIENRANELLAGNLKGVKRQSYEQALKSEYLHPQDLVDPYVTALGEVVDMAAIQKAGLKIGIDPLGGSGIAYWQRIGEYYNLDLTLVNDNIDQTFRFMTLDRDGVIRMDCSSRWAMAGLLELRDKFDLAFANDPDYDRHGIITPAGLMNPNHYLATAVDYLFRHRPQWSEKVAVGKTLVSSAMIDRVVADLGRELVEVPVGFKWFVDGLYKGELGFGGEESAGASFLRFDGTPWSTDKDGIILCLLAAEMMAVTGENPQQRYDKLAARFGTPSYSRLQAPASHQQKAQLAKLSPEMVKADTLAGDPITARLTTASGNGASIGGLKVMSDNGWFAARPSGTEEAYKIYCESFLGAEHREKIEQEAQELLTKYLLRVN

SEQ ID NO: 7170 - protein, 421 aa, Xenorhabdus sp.
MKNTELNQRRLNATPRGVGVLSDYFAQKAENATLWDVEGNEIIDFAAGIAVLNTGHRHPEIVSAIEQQLKAFTHTAYQIVPYESYVTLAERINALAPINGPTKTAFFTTGAEAVENAVKIARAYTRRPGVITFSGGFHGRTFMTMALTGKVAPYKIGFGPFPGSVYHAKYPNGLHSVSVDNALASLEHIFKADIAPDQVAAIIIEPVQGEGGFNMAPTEFMQALRTLCDEHGILLIADEVQTGFARTGKLFAMEHHNVKADLITMAKSLAGGMPLSGVTGRAEVMDAPAPGGLGGTYAGNPLAVAAAHAVLNIIEKEQLCERANQLGQHLVEILAQARTQCPAIAEIRALGSMVAVEFNDPQTGKPSPEFTREVQTRAKREGLLLLSCGTHGNVIRFLYPLTIPEAQFGKALQILSHILKN

SEQ ID NO: 7171 - protein, 330 aa, Xenorhabdus sp.
MAIEVLYGIKVLKPGLSSSVQDAGREGYYHVGIPPSGTLDRFGLAVANLLVGNTPDTAGLECTLMGPELLFEQDTVFAVSGAPMGIQLDGQPVSLNTCLLAQKGQQLKITGSSLGARSYLAIAGGIDVPLVLGSRSTYSLGSLGGYQGRRLQAGDTLPITAHCGQGPVGHHLPEEFKPEFHKHAELRVVPGMYIHRLTAESVDSFFSDEWRISSESDRIGYRFLDGRPLNFVERTPPFGAGSDPSNIVDACYPIGSIQIPSGRTPIVLHRDAVSGGGYMTLGTVVSSDLDILGQLPPGAKVKFTQVTLQQALAIRHTFQEKLQRLVTALS

SEQ ID NO: 7172 - protein, 293 aa, Xenorhabdus sp.
MSDSDLRYTFGGDEHLFIEISEAMSLKAFFRSMSLTKAIKNLALPGIFDICLANASCQIRFNPDILPPLTLLEKVQSVAEQENTGEKLSTRIIEIPVLYNDPWTHETLMRFRERHQDPHSTDLEYAARINGLADIDAFIAQHSGAPWFVSMVGFVAGLPFMYQMVEQEQQIQVPKYLIPRTDTPQLSLGHGGCFGCIYSVRGAGGYQLFGVTPAPIYDTQQRLPYLKDSMVFFRTGDIVQFKPINRDEYDQAISQVEREEFALRIRPVEFDLAAFEADPQSCTANLQEVLYGN

SEQ ID NO: 7173 - protein, 255 aa, Xenorhabdus sp.
MINIDLNSDIGEGFGPWTIGDNVDESIMALISSANIATGFHAGDPCIMRKTVELAHQKGVSIGAHPGFRDLVGFGRRHINTTPQELTNDVLYQLGALREFSALYNLPLRHIKPHGALYMHLARDSDAAHYFVSTLHKHAPELAIFCMHGSAIWREATTLGHPVVCEFYADRDYDLSGSIVFTRRVAPLNPEIIADKVLRACQEGKVRTVEGADIDVEFSSVCLHSDTPGALPLLQAIATRLQQAGITITPPHRHK

SEQ ID NO: 7174 - protein, 248 aa, Xenorhabdus sp.
MNDKKLYDPIAGVYESFSDAAPQIEIGIRTVLELAGDIQGKSVLDLACGQGLFSRLYKSHGASKVIGVDISANMLEIAKNISQQHGDGIEYHVRDVCKMESLGKFDIINASWLFCHAVSLEELESMFRVIADNLAPSGKLVAYTLSPDYRLAQGNCTNYLCDILSEEPHGEGLFYTAKFMAPPHNSSFPFTMYSWSREHFAEASKKAGLQLEWHKPILLQSDIDKQPAGFWDTYQNNCHETAIVCRFR

SEQ ID NO: 7175 - protein, 251 aa, Xenorhabdus sp.
MNEKNVYNAIADVYERFSDSAPQIEVEIRTVFELAGEIQGKSVLDLACGYGLFSRLYKSRGASKVVGADISTNMIEIARNKSRQYGDGIEFHVRDVCNMESLGKFDIINASWLFCNAISLEELEMMFRTVANNLAPSGKLIAYTIEPNYRLTKGNCNNYLCDILSEEHCRGGLLFKAEFTFPSRNPPLPPAPFTMYSWSREQHAEASHKAGLQIEWHKPMLSQSDIDNQPAGFWDTYQNNCHEAAFVCKFL

SEQ ID NO: 7176 - protein, 254 aa, Xenorhabdus sp.
QLNYHLHKPENPLSSTPIILIHGLFGDLNNLGILGRDLQQNYPVIQIDVRNHGISHRMENMDYRDMAQDVLALLNELDIAKAIIIGHSMGGKIAMSMTAIAPERIEKIVVIDIAPVAYQARRHDSIFAALHKVTEAGVQTRQAATDIMLEDIKEDGVIPFLLKSFRQGEWRFNLPVLQKEYEKIIGWETIPAWHKPALFIRGGNSDYITEEYRQDIINQFPQATAWVVAGAGHWVHAEKPEAVLRAIHRFLGTE

SEQ ID NO: 7177 - protein, 896 aa, Xenorhabdus sp.
EPQRPDPDNLLTLANEKPRGKLKIFFGACAGVGKTYAMLQEAQRLLAQGLDIIVGVVETHGRQETAALLKGLPQLPPKYIYSAQRRVPVFDIDAAIARHPAIILMDELAYSNPKGCRHPKRWQDVEELLEAGIDVLTTINVQHLESLNDIVGGITGIRVRETIPDHIFDNADDVVLVDLPPDDLRQRLHEGKVYIPAQAERAIEHFFRKGNLIALRELALRRTADRVDDQMRAFRDTRGKEPVWHTRDNLLLCIGDNHGNEKLIRKAARLAAKLDCTWHAVYVETPKLHRLPEIKRRTILKTLMLAQELGAETATLSEPHKEKAILRYAREHNLGKIIVGRYHSLYSTLFSHRWRSDFVGRLGKLGPDLDIIIIALEDKKQHWIKEPAEQRLSSDKWINQLQGFMIAIILCTFITLFSRTVLFPLDKANLITLYLLGVVVIALFYGRWPSVFSAFINVASFDIFFVKPHLSLAVNDMQYLLTFTVMLIVGVVVGNLTAGIRYQARIARYREQRTRHLYEITRELGRALNEEDVARISYHFLSNSFQAKIGLLLPDGNNHLYQVKAYNGGQMLVDEAIAKWCFDKKQPAGAGTDTLPGVPYQLIPIATPSQIFAVLAIESSNPRQLLVPEQQRLLQIFTGIIANALERLHLARGAESAKLESEWEQLRNSFMTALSHDLLTPLTRLSEQTEVLRQNLSVTNSQHAKQFQHIHQQILNISHLVNNMLDIVRIQSGSLQPNFGCYSLQEIIDNALRSLDYALSRYKIDLSLPADLSLQCDASLLERVFINLLENAIKYTEKGSELGIRATIEKEKVNIEVWDTGSGLPGGKEKSIFDKFSRIPRKHRKPTAMNSGLGLTICYHIIEIHNGKIWATNNEKGGASFHFSLPLCSTNDNREK

SEQ ID NO: 7178 - protein, 193 aa, Xenorhabdus sp.
MTWLRSSIVLLIFLTLITGIAYPLLITGLSTTLFHHQATGSLIEQDGELLGSELIGQEFTKANYFHGRPSMTAEQPYNAQSSGGSNLAPTNPLLFQKIQQRIIKIRLFNHPENHPIPVDLVTASGSGLDPHISPEAAAFQAHRIATARHLPVDLINKLIEENIEFPPIHYLGQPVVNVLKLNLALDNQRAQGK

SEQ ID NO: 7179 - protein, 688 aa, Xenorhabdus sp.
MRNKKQALFESGLVRQAIIDSVKKCHPAVQWHNPVMFVVYLGSCLATLLWLSILTGQTTGDALFTGSIALWLWFTVLFANFAEALAEGRSQAQASSLKGVKKTTWAIRLSSPSRDAAKEKVTSDCLRKGDIVLIEAGEIIPCDGEVLEGGASVNESAITGESAPVIRESGGDFSSVTGGTQVLSDWLIVECSVNPGETFLDRMISMVEGAKRRKTPNEIALTILLTALTIIFLLTCASLLPFSLFSIEANHTGAPITVTVLIALLVCLIPTTIGGLLSAIGVAGMSRMLEANVIATSGRAIEAAGDVDVLLLDKTGTITLGNRQASQFLPAPGVTERQLADAAQLSSLADETPEGRSIVILAKQRFNMRERDLRTLNATFVPFSAMTRMSGVNINDRMIRKGAVDAIRRHIEANRSQFPEAINLLVQQVASKGGTPLVVAENQRVLGVVALKDIIKGGIKERFSEMRRMGIKTVMITGDNHLTAAAIAAEAGVDDFLAEATPEAKLTLIRQYQSEGRLVAMTGDGTNDAPALAQADVAVAMNSGTQAAKEAGNMVDLDSNPTKLIEVVRIGKQMLMTRGSLTTFSIANDIAKYFAIIPAAFAVTYPQLNALNIMHLHSPQSAVLSAVIFNALIIIFLLPLALKGISYRPMNALSLLRRNLWIYGLGGLLMPFAAIKLIDMLLTVLGFK

SEQ ID NO: 7180 - protein, 545 aa, Xenorhabdus sp.
GHLIANLIEGDLPHRLTNTEMILWRCCGLKKPGDNVKEMNWWQYSFAIIAFNLAGLLLLFILLISQKYLPLNPQHFAGMKWDLALNTAISFVTNTNWQAYSGENTLSYLSQMAGLTVQNFLSAATGIAIAFALIRAFSRQGVKTLGNAWIDITRITLYLLLPLAIIIALILASQGVIQNFSPYISVHTLEGHQQLLPMGPVASQEAIKILGTNGGGVFGANSAHPFENPNTISNFVQMISIFLIPSALCFAFGLVVGDNRQGYSLLWAMGIIFVISVAIVMCAETMGNPHFMPSGINSNINMEGKESRFGILASSLYGVVTTSASCGAVNSMHDSFTALGGMIPLWLMQIGEVVFGGVGAGIYGILLFVLLAVFIAGLMIGRAPEYLGKKIDVHEMKMVALAILVTPSLILLGTALSVSFEAGRNAVTNPGAHGFTEILYAVTSAANNNGSAFAGLAANSVFYNLLLGTIMLLGRFGIILPVLSIAGSMSSKKRQPISNGTLPTHTTLFIGLLILVILLIGALTFIPALALGPIAEHLQLWQLSQ

SEQ ID NO: 7181 - protein, 177 aa, Xenorhabdus sp.
VISFINMKGGVGKTTLCISVGEYLANHKDKKVLIIDIDPQFNATQSFIGKLDLISNYLSLVKEKRTIKKIFEVNSSIYEDDYDLKKEEVLLNIYPNLDIIPGDINIMFEHNTVDNTRLIRIRNFIDDNNLQKIYDYILIDCPPTISMYTESSIMASSHYIMPMKIDQYSVLGTSNLL

SEQ ID NO: 7182 - protein, 273 aa, Xenorhabdus sp.
MDAARQPYTANFKGKVWHLQPGQLVVTAADLGLSLCDRNGKPTSRDAVERMLAFFVKEGMISIDGEKRKGRVITITNYSDYVEKIDNLPAHKAAHTAAHDEPSNNAASEQPPAHGGAHKPAHHEQEYISNNKLLDDRPRKSKSSGKVNPDAAVSSPKGDKWGTTEDLTAAEWIYQKVLVVRPNTKTPNWASWANDIRLMRQSDNRTHAEICRLFKWANQDSFWYCNILSPTKLREKWDTLEAQSTQPNRKQIANPNPESVNNWNTAEAWEEFL

SEQ ID NO: 7183 - protein, 124 aa, Xenorhabdus sp.
MKIKTSELTGKALDWAVALSLGAEICSKGRFLELTSGYFVAKKSKYYSFKPSINWTQCGQLIDDYSIDLSCEIETTGTTWSAKEYYYSNGWSYAETPQIAICRAVVSFKLGDEVYIPDELLEAE

SEQ ID NO: 7184 - protein, 204 aa, Xenorhabdus sp.
MRGKDSFPLLAYVANKKDLRRVWGKGRKTITPSQRVWVRYLMMIWGRKYGGNEYYGGASSVIGRLMIRTEWSDTEGERIIKVVKDLNKSGYQGEELFQKAHEILNPKQSLSDIIALAKESDDAAFIEQVLNKTFKRDNPIRDIAIKRYCERKYPQKIARELSRLTGCRVDWARKRSEWSEELLEEEMHYAIKREIRKENCDKHH

SEQ ID NO: 7185 - protein, 204 aa, Xenorhabdus sp.
MPKYDDSGSVTYLQWLDKDGNILPWTPEQEDMVACDWVLLSKVTPVECMLSFDLTIGTAKATLPGSEGHKAWGYVKAGYEWDEYEWSKYFGDLKVIQNKTGIVETSSFYWHTSNDDSDDVILWVANSDTNQESFQKLITFFQTKELYIIVDGVTYNLGKSLNLTTNSKYEYEIDNVYKNDDAKKLGTLLQENAGNTLHFCINWK

SEQ ID NO: 7186 - protein, 112 aa, Xenorhabdus sp.
MKETGIIKKNDIALDDNEELLPYWISVRSRELENNQPYIIRDGLSDEDLYYWLRYQAEMLKVYIDAKNRKAAELARLREIEEAIKKYQPLVEQEKFCFPHVPILQEESYQKL

SEQ ID NO: 7187 - protein, 111 aa, Xenorhabdus sp.; identical to SEQ ID NO: 7103

SEQ ID NO: 7188 - protein, 201 aa, Xenorhabdus sp.
MKSYQFDNADSLEVSMFCEIKVAQMAAYLLSKGGGRMAYLKLMKLMYLADREYMRKYGESLSGDRMVSMPQGPVLSYSLDLMNGSVQGSDDGWGKWIAGVSNYELITKLPSVDRDEYDELTDAEIGVLSDVYSEYGYMTKWQIRDYTHSHCPEWVDPHGSSYPIDPRSVFRALGKSDETAIQLANRMREQNELDRVISGLT

SEQ ID NO: 7189 - protein, 104 aa, Xenorhabdus sp.
MLLTGAKEHLFFICNDPVFYPALTKECFLAVNLTTIYRDIAYDDTCILGIGDHPFVKHDSYILYKKAEVLGVDTVTSQVMAGDIRVSDPCRNDVFDRILSGSLE

SEQ ID NO: 7190 - protein, 234 aa, Xenorhabdus sp.
MKTTLAERLKKARKQAGLSQKALGERVGVTQASIQKLEGGNALSSTKLIDIAKTLGVSPEWLSGAREDSDTTLGIRAGTSIEDESKRDSQYYKVEVFDVQASAGRGVMVRDEFIETIRSIEYANGEAKSLFGGRPAEHIKMIAVNGDSMAGTFESKDQIFVDVSVKHFDGDGIYIFVLGNQIYIKRLQLQYKKMAIISDNKKYETWYLDEHEASELFIQGKVLVSQSRAYKFHG

SEQ ID NO: 7191 - protein, 66 aa, Xenorhabdus sp.
RNDWHQADIIAALRKRGTTLAAVSREAGLSSSTLANAFSRPWPKGEWIIANYLGIHPSEIWPSRYF

SEQ ID NO: 7192 - protein, 94 aa, Xenorhabdus sp.
TMIKSFKHKGLEKFFKTGSTAGIQTNHAVKLNIQLTALNAAKKPDDMNAPGWKLHPLKGADLKGHWAISVNGNWRMTFRFEGEDAILVNYQDYH

SEQ ID NO: 7193 - protein, 97 aa, Xenorhabdus sp.
RMHNPAHPGLVLREYLGDISVTEAAKALGVTRVALSRILNGNTGISADMALRLEAALGTSAEMWTNMQSQYELWQASQQQRPEIRPIYNCTPEQLIP

SEQ ID NO: 7194 - protein, 129 aa, Xenorhabdus sp.
MRDENLQQLYYEHYDYPGRFKDEAHGKDFTRYRLEALRSDAETGQGSGNAIALQPGKLFILDNHPRLDLNQSWQTVSASHSGSQPQALETVSSGAGTTLNSHFTFIRQNQNWRPAPRPKPVIDGLQTLG

SEQ ID NO: 7195 - protein, 65 aa, Xenorhabdus sp.
VLEADVYVYPQENDEMPSNKIPHVKLFYVEQYNEKSTFSEFEFRATEWAKSQSLEFANHMMQITH

SEQ ID NO: 7196 - protein, 253 aa, Xenorhabdus sp.
MSDVNKLDDKQCPFDPDKYKVAISNDTVAPIGSYPWAMIQVYLGKKMYRSNWNFPSEYVRLAGVPDNDPYIEKYTPNNPAHWQPTQEDMLACDWIDCLLSFDMTIATAKATLAGSEGHTAWGYVKAGYEWDEHEWSKSFGDLNVIQNKTDIVVTSSFYWHTVSGSNKNVILWIANPNANQEKFAELLGFFLTKELYITVNGVTYNLGKSLSLTIDSKYEYEIDNAYDNDDAQKLGVILQQNVGNTLRFYCGWI

SEQ ID NO: 7197 - protein, 76 aa, Xenorhabdus sp.
VVRLLYQVKQSVKVFLPLAKSDGQGVAALCNYTLVGSFYQCVCYHPFNGGSGREGFGLAGHSYPVREPCLNRHHQY

SEQ ID NO: 7198 - protein, 289 aa, Xenorhabdus sp.
MSRLIKELKFFARKGGGSHKTCHDRIRIAGRLGALLLSLNIQVKSLSHLKAKHVEHYVDARLSQGIAKRTVQNEMAALRNIFRMAGREKLETSPRLSNQALGLNGTNRAGTKQAIPDATFQMVYQKALERDAGFAIALKLARLMGLRSQEAVQCSASLKSWRKQLEKSEPKLHVVFGTKGGRPRQTRVLDVAAVKEAVEQAIAFAEQRGGKLIDKPDLKQAMNYWRTYTTRIGLTGCHSPHSLRYAWAQDALNFYQQNGFSRQEARALVSMDLGHGDGRGRYVERVYSC

SEQ ID NO: 7199 - protein, 293 aa, Xenorhabdus sp.
MLLSNSASGKSNMEYKYLLSLNTHQSLCVVRINGMTAMDNLDSPNGTQSSGINSTAFLENGSNSIELLFGSRSFEEDLKPESRCEVTLKKVSAYDKNDEVISRIKLMVDKDGNPVTEESLKNTPNKEAGFDFTGMSKIPAEEGLFSAKKNYSISGLPEWMWTKARPVTEKDLPMIKSFYQDIINLFAQKELDRIWNISKPAWEEWAIADNNNGKFFFHSMRFEDKIDSDKYTVRTTPEWKKFKLVSYNNGRLFRLEVGAHGRSPILFDNKITGNTATYSPYLSIINGKVVIAR

SEQ ID NO: 7200 - protein, 351 aa, Xenorhabdus sp.
VTKEKQEFDLVFKAKKDVEEFTDQQRRRQQIQTNRKRGLEHRRHRGWTQDTTRYQVKNTLSVEGTIKIQKGAASRTWAHTLQKEFKKNKNEIGPIEACVQSIGKITNVLSVGHDSDKFKILKVDLIYPSIKLHGEYELSHNNDFQFYSKFSADIAAAPLIGLELRADVLQIVAAYFKAERALSALREAGQVYEEKVKKGENGAFVGAQLDLVLTGELNVKFGWESDDKGDWSFKKDNILETGFSIKADTNIRGGVSYYAIYGYVDATAKAEAKLLAALESKPKSLDLVFYHDGIKAMVDLSFAFGIAKEESIEDDKIKTTANIEKKGGTAREWVFQKPLSKDKSSYRISLG

SEQ ID NO: 7201 - protein, 89 aa, Xenorhabdus sp.
MGNAVKVGDIGTKHGNCPATPVIEGASTVKVDGVYLARQGDAMASHLSHSRAIAGGSCSVFIEGKPDARTGDPVDCGGVVIAGGSVNIG

SEQ ID NO: 7202 - protein, 235 aa, Xenorhabdus sp.
VEIAPYLVQVTEEVKIWLECRRTPWGIFVHSAADMKTVRQHLRKYLQVLLPQQEKPVFFRFYDPRNIWDFLGVLSDWELHCFLGPITRITTLYLEEERTDNFVKIREPFPVGATSKRKMLAITEIQLEKIQAIFTERYIEKLAGFIPEWLEKADFDFIPHIDTVECARKFFDWFGQNGITDDRNVRGLLQLFIIRHYLTIDDLPAALYAQLTEYSQPGHMRAESVLIQEMGQVPL

SEQ ID NO: 7203 - protein, 57 aa, Xenorhabdus sp.
VLHAGGIDIKGAAINLNSGGSPGDLLAPANPAILLAAASEGSMFVAHCPMKEKEKPE

SEQ ID NO: 7204 - protein, 544 aa, Xenorhabdus sp.
SGLIFTLITENLPEQTFAVVDFSLNEALSTPFRLEATLTCQTADINFADVLDSSAAFAVHRNGRIERQVTGMVTHFSLQSTGRHQSHYHITLQPPLWRASLRVNSRIFQNQSVVDIVESLLRENGVRNFFFALGYKHPPREFCVQYDESDLAFIQRLLADEGIFYYFTFDQDQHEQRIVFHDSCLSLNQVITVPYRPETDVTGETTCIRQFSWSERVGVANITTKDRTFKNPRWNREFWYEGRNLDNQRILNSYHYYDFPSRYKDDDLGQQASQYRLEYLRRDTQLGNGQGDCFAMWPGQLFNLMDHPREVFNDQWQLIQITHSGQQPQADETQSGGSGTWLSNQFTFTTRKNSYRPSPYPKPQMEEPHIATVVGPEGEEIFCDEHGRVRIQFDWDRYGEFNDRSSCWVRVSQAWAGQLMGMIAIPRIGHEVLVDFVHGDPDQPIIVGRAYHANNIPPNRLPMAKTQMSIRSKTHKGEGFNELRFEDEKDREEVFIHAQKNLAIQVRNSRGERINYDRTTSIGHDDELVIANNRKVTDRRSTGS

SEQ ID NO: 7205 - protein, 64 aa, Xenorhabdus sp.
VSKENLIRLPEVQRRTGYSKAWIYKLISAGEFPKQVKLGSRSIAFVESEIDNWIAQRIAESRAA

SEQ ID NO: 7206 - protein, 101 aa, Xenorhabdus sp.
MDYILTEAAEADLRSIIRYTRKQWGNAQTRRYITNLKQGIERLACGNGSFKDMSELYPALRMARCEYHYVFCLPRESAPALIVAIFHEKMDLLTRLTDRLL

SEQ ID NO: 7207 - protein, 95 aa, Xenorhabdus sp.
VGLWETYEELIMSRLTIDITDQQHKSLKALAALQGKTIKQYTLERLFPDTTNDDQAWQELKALLNTRINEGTEGKLSGKSVDEILNEELAENGRD

SEQ ID NO: 7208 - protein, 23 aa, Xenorhabdus sp.
VLFEDGGDDIGNVELLEDARVLA

SEQ ID NO: 7209 - protein, 2590 aa, Xenorhabdus sp.
YHLHPTQENIFYEQLLYENSPVHTLNWYTLIEENVDITLLQKTLNLLYQHIDTLRLRIFINADNEAVQYIQEQSIPTLINEYDVSKLPDPENHALLWMKQQNNIAIDYLNEIPYQFTLIRLANEKNYFFTTFHHIFIDGVGLYRFHEYVYKLYTCLKNGTSTTWLSEIPQYLTAVKKSRTYLNNFNYEDDKNYWLNFLKKNEIHQLTPYYHNKGSDNQTLTLPLSVKNDLRTFCHENKTNLLAVFSTLASIVMAELTGQQELVFNTTTHGRTTKSEKYVVGMQANTYPVHCPISRTSSIIKQIKQVESALKNSYLHGKFPNSHLTRLANQDGFSLPSILILYDRFSASDTETDQIQHFHIDTEFNINPILFRLKDHGYDQELKLTIQYLQTYFSDSEVNNILERLNNLLTAIIDNPAILVSELPILLEQERHTLLNIWNQTDAPYPQDKTLPQLFEAQAAQRPDATAIIFENQSISYGELNRHANQLAHHLIALGVEPDDRIAICVERSLDIVIGILAILKAGGAYLPLDPDYPTERLSYMLDDAAPVALLTQTALADKLTTSVPTVWLDNPAQDFDTQPDNNPDAQALGLTSRHLAYVIYTSGSTGQPKGVMVEHRNVLRLIINNGFADIGPDDCVAHCANPAFDAATWEIWSALLNGSCLHIVPQTVVLEPTDFREALIRGKVTALWLTAGLFNEYLDTLQPVFGQLRYLLVGGDVLNPQKIKQVLSADHPPAHLLNGYGPTESTTFATTYAITVPIDGMQSIPIGRPIANTRIYLLDAHQQPVPMGAPGEIYISGEGVARGYLNQPELTTERFLADPFSSESEAKMYKTGDLGRYLPDGNIDYLGRNDFQIKIRGFRIELGEVENALAAHPQIKQAVVIDRDHHGQKVLAAYLVIEGLLADEDLLTHLSARLPDYMLPTSFTFIDAIPLTSNGKVNRRALPEPVFGNRDSYVAPRNVLETQLCAIWQDVLALERVGIDDNFFRIGGNSLTAIKLIAAIRRTLSTDISLAQLFELKTIAGLATQMDAQIRTVIPPLAQARYPLSFAQERMLFIEQFEQGSDVYHIPYLVQLTQDTSLTVLEAAINRLAERHAVLSTVYRSDDHDQMYQQALETHFVIPSQACDDRATLLANVRSEIATPFDLATEPSLRLRHYQVADRHYLLLLWHHIAMDGWSIDIFMAELAEIYHALQAGRDSQLPELEITYGDYAAWQRDYLQGDIREQQLAYWQHTLAGYETLALPTDHPRPAQVNYQGRDVHFELNTQLSEQLRTLARTQETTLYTVLLSAFYVTLAKLTGQDDIVIGTPTDNRHHAQTLPLLGMFVNSLALRAQLQHTDGVTALIAQVHKLVSGAKAHQDMPFEQLIAALNIERDTARHPLFQVMFSVQAFGENPSDGNLPFSPVALDETLYSPAKFDLSLFLSDGKTAITGCLNYALSLFNDTSITRIAESYQRVLRAFVADQQQPLSNIDILSAQERHTLLHRWNQTDTPYPQNKTLSQLFEAQAAQRPDSTAIVFEDQSISYSELNRRANRLAHHLINLGVKPDNLVAICLERSMDMVVGILAILKAGGAYLPLDPAYPAERLAYMLDDAAPVALLTQTALADKLTSSVPTVWLDNPSLHLEAQPDSNLDTQSLGLTSNHLAYVIYTSGSTGQPKGVMIEHRNVLRLIINNGFADIGPDDCVAHCANPAFDAATWEIWSALLNGSCLHIVPQAVVLEPTDFREALIRGKVTALWLTAGLFNEYLDTLQPVFGQLRYLLVGGDVLNPQKIKQVLSADHPPAHLLNGYGPTESTTFATTYAITVPIDGMQSIPIGRPIANTRIYLLDAAQQMVAPGAIGELYIGGAGVARGYLNQPKLTAESFLPDPFSSVSEAKMYKTGDLGRYLPDGNIDYLGRNDFQVKIRGFRIELGEIESALMAYSQIRQAVVIDREHQGHKVLAAYLVAEDAVSDEMLLAHLSDRLPDYMLPASFTFMDAIPLTPNGKVNRKALPEPVFGNRDSYVAPRNTLETQLCAIWQDVLALERVGIDDNFFRIGGNSLTAIKLIAAIRRTLSTDISLAQLFELKTIAGLATQMDTQIRTVIPPLAQVRYPLSFAQERMLFIEQFEQGSDVYHIPYLVQLAQEASLPVLEAAINRLAERHAVLSTVYRSDDHDQMYQQALETHFVIPSQACDDRATLLANVRSEIAIPFDLTTEPSLRLRHYQVADRHYLLLLWHHIAMDGWSIDIFMAELAEIYHALQAGRDSQLPELEITYGDYAAWQRDYLQGDIREQQLAYWQHTLAGYESLALPTDHPRPAQVHYQGRDVHFELNTQLSEQLRTLARTQETTLYTVLLSAFYVTLAKLSGQDDIVIGTPTDNRHHAQTLPLLGMFVNSLALRVQLQHTDNVAALITQTHKLVTDAKAHQDMPFEQLLDALNIERDTARHPLFQVMFSVQTFGESPSDGNLPFSPVALDETLYSPAKFDLSLFLSDGKTAITGCLNYALSLFNDTSITRIAESFQRVLTAFVADQQQPLSSIDILSAQERHTLLHRWNQTDAPYPQDKTLPQLFETQAVQRPNAIAITFENQSISYGELNRRANQLAHHLIALGRQT

SEQ ID NO: 7210 - protein, 369 aa, Xenorhabdus sp.
MELDTQASLLAEQPTDNPDTQALGVMPHHLAYVIYTSGSTGQPKGVMVEHTNVTRLLAATQARFRFDSNDVWTLFHSFAFDFSVWELWGALAYGGKLVVIPTECARSPQMFYELLCRKQVTILNQTPSAFRQLIAAQEMMPHEQHTLRCIIFGGEALELHTIAPWVERNPTEQTRLVNMYGITEITVHATYRELTEADIHARHGSLIGQPLEDLRIYILDAYGQPVPIGVAGELYISGAGVARGYLNRPELTTERFLPDPFSGKPGVRMYKTGDLGRWSSDGNIEYLGRNDFQVKIRGFRIELGEIETRLEQCHGVREAVVILREDKPENKRLVAYLLPQNGAELDPAVLRRQLAEHLAEYMRPVPMSC

SEQ ID NO: 7211 - protein, 125 aa, Xenorhabdus sp.
VTHEYEAPQGRIETALAQIWQELLGLTRISRHDNFFELGGHSLMVIRLITHIKSQFMVSIPLTSLFVSPKLMEQADIIFAAQMSAIGDNDIESIQSDLDAMSAEELMAILGENDTRKKDTGGDNK

SEQ ID NO: 7212 - protein, 620 aa, Xenorhabdus sp.
MNLEDLKRAVLKKKLKEQLQTQQHQKRPPVHHADRDLPLPLSFAQQRLWFLHQLEPAASLAYHIPMSLRLTGQLNHHALIATLNRLVARHEILRTRFMLTEGQPYQHIDPADTGFTLTYQDLRTLDSETHMQHIADIGALEARTPFDLTQGPLIRGKLLQLADDDHVLLFTQHHIIFDGWSIGVLAHELSALYRMECDPDNNDSDNNNDTSLPPLPIQYADYALWQRNWLQGDVLAEQRDFWSRQLKDAPALLTLPTDRPRPASPGYTAGQIPIQFDASLSEALKLFGQRQQATLFMTLLAGWSIVLSRMSGQDDIVIGTPVANRPGNELESLIGFFVNTLALRVTFSESPTVAELLTQIRERSLAAYAHQELPFEQVVEIVQPERSLSYNPIFQVMLALNNTPAKTLTLPGLQLTPVEQVRYSTHFDLTLSLTETKAGLLGELEYATDLFDAATIERMIGYLKQVLMAMTADAMQPVARLPMLSASEQQRLLVEFNATQTRQTENPQNVLIHTLFEAQAEQHPDTTAIIHGDQVISYAELNQYANRLAHHLIALGVRTDDRVAICVERGPEMVVGLLAILKAGGAYVPLDPAYPAERLVYMLKDSAPVALLVQPSTCQA

SEQ ID NO: 7213 - protein, 70 aa, Xenorhabdus sp.
MNQAINQVISSRDVVARNVVARAHRELFTDRDAGALERYFSPNFIEHSPLVRDGLAGLRELVQTHPQLHH

SEQ ID NO: 7214 - protein, 478 aa, Xenorhabdus sp.
ISMSIATLRHFINGQYIESKGSEYFDLISPVTGESYARSPNANAEDVNNAYASAKAAFKVWGRSTPSERQKALLALADSVEKNAERLVEVQSRNTGQLKHLIASEEVATSADHIRFFAGAARFLESKATTEYLSGMTSSIRREPLGVVGQVTPWNYPLMMAAWKIAPALAAGNTIVLKPSDTTPESTLLLAELAATFFPAGTFNVVLGNASAGALVVSHKTPAMVSITGSVRAGLQVASSAAANLTRSHLELGGKAPVIVFADADMDKVVETIAIAGYFNAGQDCTAASRVLVHESVYDTFVTKLVAAAKATRFGDPEDEKALYGPLNNIRQLEQVKGFIARRPAYARIETGGRQAERPGYYFEPTVITGLEQHDEMIQTEIFGPVITVQKFRTEEEAIEKANDVKYGLASSVWTRDHARTLRLSRELDFGTVWINAHIPLAAEAPHGGFKHSGYGKDLSAYSFDEYTRIKHVMSSND

SEQ ID NO: 7215 - protein, 219 aa, Xenorhabdus sp.
VNVNVLAPRLVLVTDQQIMGGQLAYHTIVPLLSVTAEAGGKRSDSKGIGDITFGPALGYHPAPDLGYVIGLDISAPTGSYNRHDPSSPGKNHWAFQPVWAISYFPAYGYNTDLKVMYDFNLKNKKTNTTSGRAFHIDYALGWGFGNGLVAGVGGYAFQQVTNDRGPNSAQGKASAFGLGPSFRYANDKGLLVALKWQKDLIVTNRPAGSQLFLKVALPF

SEQ ID NO: 7216 - protein, 477 aa, Xenorhabdus sp.
VLSCWYPLFLSSPAYQVLKPELEKVGIEFMQSDYSTGLVQPNGRGIALKRGVLPAALQLDEIAGKDGEAFRYMVQQILHDDAELVFSLLGQNPYGFSVLRLLFSEWRKRGIDGLVEFAGHSLETFRRWSERELQSDFIRTLIAPWALHTGLGPDDASSALIGKLTFAAVVAGGMPVVKGGSISIVEALKTIIEQHGGQLLTHTNVDHIITHQRGRKYRASGVIAGERVYHATDAVVCNVTPQQLYGHLLDNVPQTVQQHAKGYRYGRGGMQVHFALNSPPSWSDPKLCHVPLIHLTESMQEICLSVTQANNGYLPEHPTLAIGQPVALDPGRAPEGGWILWIQMQELPTHLKGDALGEIPVPEDGRWNDVVREAFADRVQARLERVIPGFSSTIVGRRAYSPADLQTLNCNLVEGDPYSGICTPDQFFWLRPFASSKRTKAHQTFIRNVFHIGASAHPGPGLAGTSGYLVARRLARH

SEQ ID NO: 7217 - protein, 248 aa, Xenorhabdus sp.
VIDLTQTLSPDFPALQLPEQYGQVWSFKMERISCYDENGPGWYWNNFSCGEHTGTHFDAPAHWVSGKDYSDNTVDSIPLHNFVAPAVVVDASQQVANNPDWLLTIDFLLEWENRHGQIPAGAWLLFRTDWSKRADDPTRFLNMHGDGAHTPGPDQETVEWLIHKRNIRGFGVETINTDAGQSYSWPVAYPCHTLMHGANKYGLQCLKNLDLLPPVGTVIIAAPLKIAGGSGSPLRVLALVEQPDGTTL

SEQ ID NO: 7218 - protein, 197 aa, Xenorhabdus sp.
VENFSVEKVNMTMNIQNSEAMLPGTEWGITEFEARALRTILGSYPTGVAIVATRTADGRNVGLTINSFASLSLEPPLILWSLVNHSPNLAVFQNCEYFTISILSCDHQELALRFANPRVENKFQDIPVQETPEGIPAICGAIATLVCSNHQQTHVGDHLLMIGQVKRIASLEGKPLVFHCGMFTELHDVGSNMGEDA

SEQ ID NO: 7219 - protein, 416 aa, Xenorhabdus sp.
MRRIAIVGGGQAGLPLALGLLDKGYQVTVVTNRTPDDVRNGRVMSSQCMFDSSLQFERKLGLNKWEALCSPVEGIGFAVPHPEMPNTKAIDWSARLDKYAQAVDQRIKMPFWMELFASRGGNLVILDVGVNELEQLASTHELVILAGGKGEVVRLLERDVTRSPYDKPQRALALTYVNGMLPVPEYSRVSFNLIPGVGEYFVFPALTLSGPCDIMVFEGIPGGAMDGWQEARTPQEHLAYSLHILKTFLPWEAARCEKVELTDDNGILAGRFAPVVRKPVLTLPSGRQVFGLGDAVVTNDPLTGQGSNNATKACQIYYESILARGDKLFTAEWMNDTFERFWDYSQYVVEWTNSLLIPPKPHILHLLGAAQQLPALASTIANAFNHPPVLFPWWRDSDACEAYINSQTQHAQAANS

SEQ ID NO: 7220 - protein, 262 aa, Xenorhabdus sp.
MKGLSNKVAIVTGGATKIGAAVARVLSEYGVKVAIFDIDREGGKKACDVRPDDIHFWPVDITDDKQLSQGIQEVAAYYGHLNCLVNLAATYLDNGADSGREMWLTALNINVVSAIKAAQFAHPYFMAAGGGAIVNFTSVSSSVAQTGRWLYPASKAALLQATRSMAMDYAADRIRVNSVSPGWTWSRVMDELTQGSRRKTDEVAADYHLLGRAGDPEEIAQVVSFLLSDLSSFVTGADYSVDGGYSVMGPEQAKPAICRLAE

SEQ ID NO: 7221 - protein, 437 aa, Xenorhabdus sp.
VTRRTIGVDERPPLRQTIPLSLQHLFAMFGATVLVPILFKINPATILLFNGIGTLFYLFICKGRIPAYLGSSFAFISPVLLLLPLGYELALGGFIVCGLLFCLVSLIVKIAGRGWLNVMFPPAAMGAIVAVIGLELAGVAADMAGLRPAAGTDVNTTNLIISMVTLAVTILGSVMFRGFMAIIPILIGVLVGYTLSFFMGVVDFTPVREAPWFALPTFYTPRFEWFAIMTILPAALVVIAEHVGHLVVTANIVQKDLLKNPGLHRSMFANGFSTIISGFFGSTPNTTYGENIGVMALTRVYSTWVIGGAAILAILLSCVGKLAAAIQIIPVPVMGGVSLLLYGVIGASGIRVLIDSKVDYSKAQNLILTSVILIIGVSGAKIQIGAAELKGMALATVVGIGMSLIFKLISIIRPDEPYISSSVESFSDDKKACEIIK

SEQ ID NO: 7222 - protein, 239 aa, Xenorhabdus sp.
ILFEVLLNTPAQLSLPLYLPDDETFASFFAGENSSLLAAIKLAISQSHGSYIYFWSRDGGGKSHLLHAACAELSQQGEAVGYVPLDKRAYFVPEVLDGMEHLSLVCIDNVECIAGDQVWEMAIFNLYNRIVEIGKTCLLITGDRPPRQINLTLPDLASRLDWGQIYKLQPLSDDEKIQALQLRAKLRGFELPEDVGRFVLKRLDREMQTLFRTLDELDRASIVAQRKLTIPFVKDILDL

SEQ ID NO: 7223 - protein, 355 aa, Xenorhabdus sp.
MLDMIMRWYRRRFADPQVAALSFILLAGFGIIYFFNGILAPVLAAIVLAYLLEWPTVKLEKLGCSRTLSVTIVLAIFMGISALIILIVAPTVWQQGLNLFSDLPNMLNRFKEYARTFPSRYPILVDVGIIDMFAENLRNKFSLAGESVFKFSVASLIGLMTFSIYLIIVPLMVFFLLKDKNKMVAAFQRILPRNHGLAGQLWHEMNQQITNYIRGKVVEMVILTICTYAVFAFFELHYSMLLAVLVGLSVLIPYVGTVIVTIPVIVVALFQWGLGADFWTLFIAYLVVQGLDGNLLVPILFSEAVNLHPLIIIISVIIFGGLWGFWGVFFAIPLATLIKAVINVWPEDKSEELSS

SEQ ID NO: 7224 - protein, 288 aa, Xenorhabdus sp.
VVQIVLGSSIGLMVKGLPMEEGRDILMLLPALLICLILQFNVGYFWFHRKMGWTRTESVLGAVPGALAAILVLTEHSKTPPQKIVISHAIRLVVLIIIAGIITGLNPPPVIEVAPFSYTPGIIGWLILIATGGYIVGVLLERLHIPAPYMLTSLVVAIIVHYLSDVTLKLPELLSLLSMGLMGMRIGLYFSAFPFSALISNIWSSIQSVFIALTITVLVAAVTAQVMDYPMHLLILSWAPGSMEAMLFAAMAMKVNVGIVMASHIIRMSLLHIVSAIALNVQGRHKNS

SEQ ID NO: 7225 - protein, 264 aa, Xenorhabdus sp.
VAKCRKPLFVSQLAHKDSERQRAYASMLMGNGSHYQWSHGISFKGSREPSTRGRSLAFYTFALLASTKINLPNPTIYIPENGVISINPPLVPGRVSSLSTRTTHPMFIDMLQRVLDNLGIHVQLELPYRFKTKGEMMRECLDQDLLQKWAADSTSCGRFRTYNRQHCGRCVPCLIRRAAFLAWKPEGDTTSYRFESVVGSDKSSAPDDPMAVALAILDVRKRGLDRFLGGSLVFAPIKERPMYRRVLQQGIKELETVLVQDKLL

SEQ ID NO: 7226 - protein, 182 aa, Xenorhabdus sp.
MLLELIQNVAAVGEIGLDGSKRYSTNYAMQRRVFSEVVRKCHDVGGRAMSIHSRQAVPDVLATLKAFPSHGIPILHWFTGSVTELRDASAQGCWFSIGPAAFNSAAGKALATKLPKDRVVPESDGPFAQFSNRTVMPWDFNITVRLLGEAWSMPENDVKLQLLNNTKTLLGQMGNDRIALNF

SEQ ID NO: 7227 - protein, 304 aa, Xenorhabdus sp.
MESARDKHTREIVEAEDLWLLDSVDTEGYVCWGCGITMHPAAWEKDKKVRAYFKKKRHIQHHHECDADAESTVIRQGQKASVRNILDSAPGLMPSGLKLIEKRPVVELGFPGDESKSSSTRSASSQSGEGNSPERQSRRQVNAIRNICRAFIRFPHDRGMSLNVPGISGQIYMTAFKKLRNEVQPYPEPKIFYAPLLWNKFTENDENLIIPLSGEWGEDESGKPKPTRSYQIYIDWASWSKAKRTVVRKELEAARTEAIEAKGKGLKDKAWVFFIGEQDTENPEIFYVSDYRLICAIVGHITYP

SEQ ID NO: 7228 - protein, 310 aa, Xenorhabdus sp.
VEGAALAVVGFTAQVASGLDKLYWQAQRTGGTAEQIKTLGYAVSQAGGTVEGLNSSLENVARFLRNNPGGEGFLRNMGIQTRDTNGQLRDTASLVALVGERLSGMPSFRANQYASMLGIDENTMLAMRRGVGGYAADYKKVIKQLGYDPALAAKHANNFMTQMYQLKMVTGSAKDKIGGELARIVQGKVNIGWKSVSAGFKNVVTYTGNNKLSCCDEDGMIIDSCVAKLRNVGMAQECDFIEHHYVSGMSKRAIDRKFKLGESEVRKRMLVAESFILGCLEALNEPLEIDLIYGFHGNRVNSSSSALNTP

SEQ ID NO: 7229 - protein, 49 aa, Xenorhabdus sp.
VNMPITIHNVDNALTPIQAVINVDYCSDQFVVNVYHLEVSRSHGAHHQR

SEQ ID NO: 7230 - protein, 510 aa, Xenorhabdus sp.
MPLKHDTPTPKPLEIATIDLGSNSFHMVIARIVNGALQVIGRLKKRVYLADGFNDKNELSEEAIKRGLESLSLFAERLQGFPAENVCLVGTHSLREASNAEEFLQRAKEVIPYPIEIISGHEEARLIFMGVEHTQPEKGRKLVIDIGGGSTELVIGEGFEPLLIESRRMGCVSFARQFFPDGVINEHNFRKARLQAEQKLENLIWQFRTKGWDFALGASGTIKAVHELLVELGEKDGLITPERLQMLVKRVLKYKNFKSLDLPGLSDDRKQTLVPGLAILCGIFDALNIQELCLSDGALREGVLYEMEDRFRHLDIRQRTAKSLADHYNIDREQASRVWDTAKTLYDQWAAQNPKRVQPQLESILLWAAMLHEVGLSINLSGLQRHSAYILQHTDLPGFNQEQQSLLATLVRYHRKAVKVHEHPRFYLFKKKQYLPMLQILRLATLLNNQRQSTTTPESLRLETDHGHWILSFPRNYLTQNTLMQLDLEKEQAYWKDVTGWHLHIQEEST

SEQ ID NO: 7231 - protein, 689 aa, Xenorhabdus sp.
MSQDRLYTEKELSWLSFNERVLQEAADKSNPLIERMRFLGIYSNNLDEFYKVRFADVKRRILISEARGSATGSRQLLKKIQSKVAKIDQEFDELYNDLLLEMARNQIFLINERQISPNQQIWLRQYFRQHLRPHITPIVINPETNLVEFLKDDYTYLAVEIIRGQETKYALLEIPSDKVPRFVNLPPEMPKRRKSMILIDNILRYTLDEIFKGFFDYDTLSVYSMKMTRDAEYDLATEMESSLLELMSSTLKQRLTAEPVRFVYQRDMPDEMVELLRSKLGLSNDDSVIAGSRYHNFRDFIKFPNEGNRTLLNKPMPRLRHTWFDHFRNGFDAIREQDVLLYYPYHTFEHVLELLRQASFDPSVLSIKINIYRVAKDSRIVESMIHAAHNGKKVTVVVELQARFDEEANIHWAKRLTEAGVHVIFSAPGLKIHAKLFIISRLEGNEIIRYAHIGTGNFNEKTARLYTDYFLLTAKPEVTNEVRRLFNLIEYPYRPVTFENLMVSPQNSRAMLNKLIDQEIENARAGEIAGITLKINNLVDRELVDRLYDASEAGVKIRLLIRGMCSLVPGQPGFSENIQVTSIVDRFLEHDRVYVFTNKGDEKIFLSSADWMTRNIDYRIEVAVCLLDPLLKQRVLDILELQFSDTVKARYIDKELSNRYVPRGNKRKIRAQTAIYDYLKNLEQPESRV

SEQ ID NO: 7232 - protein, 178 aa, Xenorhabdus sp.
VNLRPLEREDLPFVHQLDNNASVMRYWFEEPYEAFVELCDLYDKHIHDQSERRFIIESMNSKVGLVELVEIDYVHRRAEFQLIIAPAYQGQGYATEAVKLAMEYAFSVLNLYKLYLIVDKENEKAIHIYNKLGFYTEGELIDEFFVNGSYHTAIRMCTFQHHYFANKIRHSQSKKQHC

SEQ ID NO: 7233 - protein, 209 aa, Xenorhabdus sp.
IAVLISGNGSNLQSIIDACQQNRINGQICAVFSNNADAYGLQRAEESAIPTHFLNPKEYSDRTDYDSALLTAIDQYQPDLVVLAGYMRILSSGFVQHYRGRLLNIHPSLLPKYPGLHTHRKAIESGDQEHGISVHFVTKELDGGPIILQAKVPIFAEDQEEEVIQRVQTQEHNIYPLVIGWFLEGRLSMGNNTAILDGKVLSQQGYASD

SEQ ID NO: 7234 - protein, 347 aa, Xenorhabdus sp.
VTNKTSLSYKDAGVDIDAGNALVNRIKSVVKQTRRPEVMGGLGGFGALCSLPQKYREPVLVSGTDGVGTKLRLAMDLIRHDTIGIDLVAMCVNDLVVQGAEPLFFLDYYATGKLDVDTASSVITGIAEGCKQAGCALVGGETAEMPGMYHGEDYDVAGFCVGVVEKSEIIDGSKVQAGDALIALSSSGPHSNGYSLIRKILEVSQTNPETTELDGKTLADHLLAPTRIYVKPLLELIEQVEIHAICHLTGGGFWENIPRVLPENMQAKIDGTSWQWPAIFKWLQQAGNVSDHEMYRTFNCGVGMIIALPQSQATQAIEWLNKAGENAWQIGSIAESDHSGQQVTISE

SEQ ID NO: 7235 - protein, 119 aa, Xenorhabdus sp.
MQHVIFYHNPRCSKSRETLKLVQELGITPEVIHYLDTPPTAEQLAVLLKQLGFSDARQLMRTKEELYKELRLDNSELTQEALLQAMADNPKLIERPIVVAGDKARLGRPPEQVKEILGN

SEQ ID NO: 7236 - protein, 487 aa, Xenorhabdus sp.
MKKTSTKSLIAILISLTLFGNSPAYSVPTDETLPDIGTTAASTLSTNQEIEMGDFYIREIRAGTPLIYDPLLTQYINKLGQKLVNHADAVKTPFHFYIVNNPNINAYAFFGGNVVLHSALFRYSRNESELASVMAHEISHVTQRHLARMMEDTQRKAPLAWAGTLGSILLLMANPQAGMAALSGTLAGFSQGMISFTRENEQEADRIGMRILSRAGFDPYGMPNFMQTLSERTLHNSEIPEILYTHPLPDSRLADARNRANQYPKKSIPESQEYLLARVRILTLESTLSSAYIEGLLNKYSRGTPKEQISASYGRVLLLTKQKKYAEARKVLTPLLNSQPDNIWFIDAMTDIDIEQTQYEQAITRLQQALHKHKNNPVLQINLANVYIEAKQYPKASQLLFQYTFSHPDSLTGWSLMAEAASKQGKRSEELSAYAETMALQGKFDMAINYLSQASALAKLNSYDQARYDARIDQLRKLQQRYSQYKK

SEQ ID NO: 7237 - protein, 204 aa, Xenorhabdus sp.
IKTYLGSHGLHNEENLDTILEVLGYATDETPSIMAVRVDTHYPPILDDTVCCFPNLEPGVISRFINSLKAMLKASEQRRRRDGTRIHPNTLRDVWAKEYSLAGKCHFHVCLIFNEQAYNRLGDYNIDTSLRMMIVRAWYSALGLVPEDYPGLVHFPENYRYILDRNSADYIYEFGELVHRLDYLTKLDSKIYEEGERNFGGSHK

SEQ ID NO: 7238 - protein, 95 aa, Xenorhabdus sp.
MKIEYIDEGMSSKIIESSVITAHRRHNRCIDAALLATPVRASTSVGFLFRMTVITGKTPHVLRAYKIIFDDERHDCGTPPDGRHSRRTGQNNSPH

SEQ ID NO: 7239 - protein, 91 aa, Xenorhabdus sp.
VTRNGGAHFTMQVGKTEINIAIVEGVKGIRELVDSYALEALQQSYPAWEVIAIALMEKCVVNGLLTVYGREIWQSMINDMGETLAAKGMFQ

SEQ ID NO: 7240 - protein, 176 aa, Xenorhabdus sp.
MIINSNLLRAALVCVAKKDPRYYLCGVHITSNYLEATNGHVALRLEHGISTRRKAIVQFHGRIPRKAETTELHFTKEPYAVHRDITGMRVGFSALTLLDGRFPDLDRLIPKKVESVIPHFQAEYLAYPQKMFEGDSAFIAVSMYPSSMTDACLMKFSDNINQRYGNPQLVVMPCRV

SEQ ID NO: 7241 - protein, 249 aa, Xenorhabdus sp.
VITINQTQMPVVEYQGQRVVTFSMIDQVHARPEGTAKAAFNRNNHRFVQGVDYQVLSQDDIRTDLPRWACFQSSPPTGIVLFESGYLMLTKPFNDDLAWQVQRELVSSYFRKPQTAINELEMIARIASHTAQQQRQINHIGEKVDQVQETIEQIKRGTIPVGWIGFSLATTESGLSNAKCRTLAEQYSVPTQSITTLTPDGQPRPMKVVFKEDFMIAFNLMMSEAEKRGTRWSHPKMGSFQVIGWEDKQ

SEQ ID NO: 7242 - protein, 132 aa, Xenorhabdus sp.
VLANYPPITDEEKMECAEFSVKQKRAIAAKEYLVSCGERFGRLENGNVVFSHENCTVELDSEVIETLLIHQIEKPILEINPVEKYIALQRFYLGNEVNEKENGSTWMRDFIDGVFINGFKLFTAEPVSPSTH

SEQ ID NO: 7243 - protein, 105 aa, Xenorhabdus sp.
MKKQSYLDFANIAIQMEKEEKYNLAAEYWEKANKLANTLNTQLWSEYRQEHNEKRYSLHHSHSTALRSQKENQRTKEVLKKHLDNHTETNKWKQKFQQAMNNEGI

SEQ ID NO: 7244 - protein, 46 aa, Xenorhabdus sp.
MHVLLILALKELKKTIEDDDYFMLRAIKRLSIRQFEVLNELNNNFE

SEQ ID NO: 7245 - protein, 253 aa, Xenorhabdus sp.
MNMSTQNSNSSVDVPTMDDVRKAIKEAIAEHAASRNHPYATQVEPGLVTLSNDTDSDSEITVATSKSVKKAYDLANSANQNASSANDNANTRLSKDRNGADIPDKTNFLKNIGLGETANVRFNDVYANVLHSSILNLTGNVTGVQFYSPDGSGRRRRIERALDSDPVMFRFIDRAGDAENNRNIAVIEMPRVTYGQVLVLRGNCINDPNGYIRIASPIIEIFSSGAFTTNDESEGTTVEYLSKGTYLINPNSG

SEQ ID NO: 7246 - protein, 43 aa, Xenorhabdus sp.
VPLCSYLTQLKGNPTGIAFIDSTRLSVCHNIRIPRHKVFEGTA

SEQ ID NO: 7247 - protein, 120 aa, Xenorhabdus sp.
VVRELAKELIGSLYGDKGYLSQELANDLAQNGVTFITKKRSNIKASVLEDWDKIMLSRRFIIETVNGQLKNICQIEHSRHRSIKGFLLTVLTGLIAYCHKKKKPSLKVFYSEEEDIPVTA

SEQ ID NO: 7248 - protein, 36 aa, Xenorhabdus sp.
MDFGLLEESLAAGKASAKVAIVIAVILSILAGVLVW

SEQ ID NO: 7249 - protein, 115 aa, Xenorhabdus sp.
MVSNASALGRTGIQDWLLLRASAIVIVLYVLYLVGFVATTSDITYEVWSSFFSFSLTKVFTVLALLSILVHAWIGVWQVLTDYVKPLALRLVLQLVIIVALLTYLIYGTIVVWGV

SEQ ID NO: 7250 - protein, 588 aa, Xenorhabdus sp.
MKLPVREFDAVVIGAGGAGMRAALQISQMGLSCALISKVFPTRSHTVSAQGGITVALGNTHEDNWEWHMYDTVKGSDYIGDQDAIEYMCKTGPEAILELEHMGLPFSRLDNGRIYQRPFGGQSRNFGGEQAARTAAAADRTGHALLHTLYQQNLKNHTTIFSEWYSLDLVKNQDGAIVGCTAICIETGEVVYFKAKATILATGGAGRIFQSTTNAHINTGDGVGMALRAGVPVQDMEMWQFHPTGIAGAGVLVTEGCRGEGGYLLNKDGERFMERYAPNAKDLAGRDVVARSMMIEIREGRGCEGPWGPHVKLKLDHLGKDVLESRLPGILELSRTFAHVDPVKEPIPVIPTCHYMMGGIPTKITGQALTINDKGEDVVIPGLFAVGEIACVSVHGANRLGGNSLLDLVVFGRSAGLHLKECLMEQGTTRDASESDVDVALQRLNRWNNTRSGEDPVEIRKALQACMQHNFSVFREGEAMARGLDELKVIRKRLHNARLDDTSSEFNTQRIECLELDNLMETAYSTAVAANYRTESRGAHSRFDYPERDDANWLCHSLYLPQTESMTRREVNMQPKLREAFPPKVRSY

SEQ ID NO: 7251 - protein, 238 aa, Xenorhabdus sp.
MKLEFSIYRYNPDVDNAPRMQDYTLEAEEGRDMMLLDALIQLKEQDPTLSFRRSCREGVCGSDGLNMNGKNGLACITSISALRRGNKKIVIRPLPGLPVVRDLVVDMGQFYAQYEKIRPYLINDGKNPPAREHLQSPEQREKLDGLYECILCACCSTSCPSFWWNPDKFIGPAGLLAAYRFLIDSRDTETSSRLDGLNDAFSVFRCHGIMNCVNVCPKGLNPTKAIGHIKSMLLRHSA

SEQ ID NO: 7252 - protein, 935 aa, Xenorhabdus sp.
MQNGAMKDWLDSSFLAGANQSYIEQIYEDYITDPNSVDAGWREIFQQLPDEGLHGEQLHSQTRDYFRRLAKDATRYHTSVSDPAMDAKQVKVLQLINAFRFRGHQNANLDPLGLWKQEPVPDLDPAFHNLTKADFEETFNVGSFAIGKETMKLADLYDALKRIYCGSIGAEYMHITNTEEKRWLQQRLESVAVGSQFNTEEKRRFLAELTAAEGLERYLGAKFPGAKRFSLEGGDALIPMLKELIRHAGKQDTREVVLGMAHRGRLNVLVNLFGKKPADLFDEFAGKHKEHLGTGDVKYHQGFSSDFETDGGPVHLALAFNPSHLEIVSPVVIGSVRARRDRLDEGRSNMVLPVTIHGDSAVTGQGIVQETLNMSQARGYEVGGTIRIVVNNQIGFTTSNPKDTRSTEYCTDIAKMVQAPIFHVNADDPEAVTFVTRLALDFRNTFKRDVMIDLVCYRRHGHNEADEPSATQPLMYQKIKKHPTPRKIYADKLIAENLLSPNDVTEMANLYRDALDHGDCVVDEWRPMGLHSFTWEPYLNHEWDAEYPHQVDMKRLQDLGKRISSIPAEVAMHSRVAKIYADRAEMANGNKLFDWGAAETLAYATLVDEGVPVRLSGEDAGRGTFFHRHAVIHNQTDASVYVPLANVHNGQGEFNVWDSVLSEEAVLAFEYGYATTEPRTLTIWEAQFGDFANVAQVVIDQFISSGEQKWGRMCGLVMLLPHGYEGQGPEHSSARLERYLQLCAEQNMQVCVPSTPAQVYHMLRRQALRGMRRPLIVMSPKSLLRHPLAVSSLDELADGKFETVIGEVDALDPKGVKRVVLCSGKVYYDLLEQRRKNEQSDVAIVRIEQLYPFPRQDLQNLFEQYAHVHDFVWCQEEPLNQGAWYCSQHNFREAIPFGASLRYAGRPASASPAVGYTSVHQKQQQALVNDALNVE

SEQ ID NO: 7253 - protein, 405 aa, Xenorhabdus sp.
MSSVEILVPDLPESVADATVATWHKKPGDAVERDDILVEIETDKVILEVPASEAGVLEAVLEEEGATVLSKQLLGRISLSNSAGMPTAVKETTEATPAQRQTASLEDESNDALSPAVRRLIAEHDLDPAAIKGSGVGGRIVREDVEKHIAANKKESAKPAASAPAAQQSELPHRSEKRVPMTRLRKRVAERLLEAKNNTAMLTTFNEVNMKPIQELRKQYGDVFEKRHGVRLGFMSFYVKAVVEALKRYPEVNASIDGTDVVYHNYFDISIAVSTPRGLVTPVLRDADALSMADLEKTIKELAIKGRDGKLTVDELTGGNFTITNGGVFGSLMSTPIINPPQSAILGMHAIKDRPMAVNGQVEILPMMYLALSYDHRLIDGRESVGFLVTIKEMLEDPTRLLLDV

SEQ ID NO: 7254 - protein, 388 aa, Xenorhabdus sp.
MNLHEYQAKQLFARYGLPAPAGYACTTPREAEEAASKIGSGPWVVKCQVHAGGRGKAGGVKVVNSKEDIRAFAEQWLGKRLVTYQTDVQGQPVHQILVEGATDIAKELYLGAVVDRGTRRVVFMASTEGGVEIEKVAEETPELIHKAIIDPLAGPMPYQGRELAFKLGLTGKQVGQFTKIFMGLANLFLERDLALVEINPLVITTEGDLICLDGKLGADGNAMFRQAELREMHDPLQEDPREAQAAQWELNYVALDGNIGCMVNGAGLAMGTMDIVKLHGGAPANFLDVGGGATKERVTEAFKIILSDENVKAVLVNIFGGIVRCDLIADGIIGAVEEVGVHVPVVVRLEGNNAEQGAKKLADSGLNIIAATSLTDAAKQAVAAAGNK

SEQ ID NO: 7255 - protein, 281 aa, Xenorhabdus sp.
VICQGFTGSQGTFHSEQAIAYGTQMVGGVTPGKGGTEHLGLPVFNTVREAVEATGATASVIYVPAPFCKDSILEAIEAGIKLIITITEGIPTLDMLTVKVKLDEAGVRMIGPNCPGVITPGECKIGIMPGHIHQAGKVGIVSRSGTLTYEAVKQTTDAGLGQSTCVGIGGDPIPGSNFIDILKLFQQDPQTEAIVMIGEIGGTAEEEAAAYIKEHVTKPVVAYIAGVTAPKGKRMGHAGAIIAGGKGTADEKFAALEAAGVTTVRSLADIGDAVKGLLAGK

SEQ ID NO: 7256 - protein, 528 aa, Xenorhabdus sp.
MFDIVELSRLQFALTAMYHFLFVPLTLGMAFLLAIMETVYVLSGKQIYKDMTKFWGKLFGINFALGVATGLTMEFQFGTNWSYFSHYVGDIFGAPLAIEGLMAFFLESTFVGLFFFGWDRLSKKQHLAVTWLVALGSNFSALWILIANGWMQNPIASDFNFETMRMEMVSFSELVLNPVAQVKFVHTVAAGYVTGAVFVLGISSYYLLKGRDISFAKRSFAIASSFGIAAVLSVIVLGDESGYEMGDVQKTKLAAIEAEWETQAPPAAFTLIGIPDQDKMENKYSIHIPYVLGLIATRSTDTPVIGLRDLMSQHEQRIRNGLKAYELLEELRAGNTDPAVRSAFNESKKDLGYGMLVKRYTPEVTNATEEQIKAAAKDSIPRVAPLYFAFRIMVACGFIMLLVIGLAFFSVIRNRIGQQKWLLRAALFSIPLPWIAVEAGWFVAEYGRQPWAIGEVLPTAVAASTRSVGDLIFSMALICGLYTLFLIAEMFLMFKFARLGPSSLKTGRYHFEQKAVSSTKNSSVNSIE

SEQ ID NO: 7257 - protein, 379 aa, Xenorhabdus sp.
MLDYEVLRFIWWLLIGVLLIGFAVTDGFDMGVGVLLRVIGKNDTERRIMINSVAPHWDGNQVWLITAGGALFAAWPMVYAAAFSGFYVAMILVLAALFFRPVGFDYRSKLEDRKWRNMWDWGIVVGSFVPPLVIGVAFGNLLQGVPLSVDSYLRVSYEGSFFGLLNPYGLLAGVVSLMMIITQGATYLQMRTTGELHLRSRTATQVCALITAVAFLLAGVWLIYGIDGYVVTGGLDVNGVSNPLHKEVVQQAGAWLINFNNQPILWAIPALGVVFPLLTMLATKLDKGAWAFLFSSLTVACIILTAGISMFPFVMPSSLDPNVSLTMWDATSSQWTLQIMFVVALIFVPIVLSYTIWCYYKTFGRLDKGYIENNKHSLY

SEQ ID NO: 7258 - protein, 131 aa, Xenorhabdus sp.
MLFRWPIRVYYEDTDASGVVYHAQYLAFYERARTEMLRDKGFHQKYMLDEQIGFVVSRMTVDYRKPARLDDKLVVECEVTNIRGASLTFTQRIIDCNDVVISNAECLVVCVNSSQMKPIALPKSIVAEFKQ

SEQ ID NO: 7259 - protein, 181 aa, Xenorhabdus sp.
VEAFEDKFWSGIELSRLYKESQSHRDSLSGTEQIFYSGFKEFSRLHQANSHAPEAILTGASRAMRISMNRELETLENHIPFLGTVGSISPYIGLFGTVWGIMHAFIALGSVKQATLQMVAPGIAEALIATAIGLFAAIPAVMAYNRLNQRVNKLEQTYDNFMEEFLAILHRQAFVSNTNKS

SEQ ID NO: 7260 - protein, 112 aa, Xenorhabdus sp.
MATAPIITQSVEVDLPDSVDSKTVSSTDNPPVIVEVSGVGRYNMVVNQERLELLPEQQIIAEAQTLIKANPKTIFLIGGSKEVPYDEVIKALNMLRQAGVKSVGLMTQPIGA

SEQ ID NO: 7261 - protein, 95 aa, Xenorhabdus sp.
MGGGGVGGTVIDAVMVDPNAVVQQYNQQQQQQANAKLAEQQRKKKAEQQAAELRAKQAEEQERLKAAEEERIKAQQVAQEQKKQADAAAAKARQE

SEQ ID NO: 7262 - protein, 150 aa, Xenorhabdus sp.
MESVMPTCFDVADYFLACCDEESGDTISNLKLQKLVYYAQGFSLALLGKPLFEEQIEAWMHGPVIPELYQKYKKHKNNALPNDGYYEENFDREELALLEEVYDVFGQFSAWKLRNMTHEEAPWKDNYIEGVGCQVISHEELKDYFLTRIN

SEQ ID NO: 7263 - protein, 253 aa, Xenorhabdus sp.
IGGNNSNSMLPYIDYDAIRKDPKIIIGYSDITALLLGIYQKTNVVTFYGPALVASFGEFPPLVDETFNNFSQIVNNNHSLPFIYKQPEHWADEYIDWETQITPKNTYPNNWIFDGKGTFRGRLIGGNLNTLCGIWGSEYMPEIKTGDILLIEDCFKGIELVERAFSHLLLCGVFDKVSAIILGKHEQFDDKGTGRNSLDVLKEVLNEKEVPVLADFDCCHTHPMFTMPLGVDVDVVVDFDSESVYLPEPYCVN

SEQ ID NO: 7264 - protein, 427 aa, Xenorhabdus sp.
MADKKATLTINGSAAIELDVLTPTLGSEVIDVRTLGSKGFYTYDPGFTSTASCESKITYIDGNEGILLHRGFPIDQLAMKSTYLEVCYILLNGEPPTPEEYEKFKTTVTRHTMIHEQITRLFHGFRRDSHPMAILCGVTGALAAFYHDALDVNNPRHREITAYRLMSKMPTVAAMCYKYSVGQPFVYPRNDLSYAGNFLYMMFSTPCEEYKVNPVLERAMDRIFILHADHEQNASTSTVRTAGSSGANPFACISAGIASLWGPAHGGANEACLRMLEEIQTVDHIPEFIARAKDKNDAFRLMGFGHRVYKNYDPRATVMRETCHEVLDELGLNDSLLEVAMELERIALNDPYFIEKKLYPNVDFYSGIILKAMGIPSSMFTVIFAIARTIGWIAHWNEMHDEGMRIARPRQLYTGHAERDFNSQLKK

SEQ ID NO: 7265 - protein, 380 aa, Xenorhabdus sp.
MINELGWSWTDAGLGFTLLGLTCGLSSFLPTVFIRRVGVRFTLFIGLLIFLAGFYNLYHTHAIASYFIGTALIGVGFTFLATVPGTYVISRLYEKQSLAFGFYFTIGGLGGVIGPWIYFLATRVWGTWRMHWMISAIVLTVFVIVTIFTLREGEKEIAHAKAISQKNNRENSSSIYRTQQFWTAHQALRTWQFYVIAATYTAFLWCGITVNSFAVAHIIENGFNEAIAAGLLSSMAFINAFSRLAGGAVGEWLEPKKLLLGSLTIIILGLIALSIAFSWPFLIAFTLFVGMGYGMTFLASSVLLANYFGRKPYLELFSIMNLISTLACLAPFFAGAIKDYSGSFTWAFLIIAFPVFAVLIVTMVMKPPSHKIRGASVKTE

SEQ ID NO: 7266 - protein, 221 aa, Xenorhabdus sp.
LFPFTNIFNEIMNFKSTLYSHVFFLLLLMLCSARAMAADTLLILGDSLSAGYRLPIEQSWPVLMANQWHQSGNKVNIINGSISANTAAQGFERLPELLKQHKPKWVLIELGANDGLRGFPVRQIEQDLQKVISLVKQSKAQPLLMQIRIPPNYGKRYTESFAGIYPALSKNNDIPLLPFFMEQVAIKPEWMQDDGLHPNQAAQPFIADWMSRKLSAYITHK

SEQ ID NO: 7267 - protein, 292 aa, Xenorhabdus sp.
MEPTMNTNSNTAQIVRINEANIAQVVQQSLTTLVVFYFWSPQDLHCHELESTLDKLAHEYAGQFILAKVDCDQLGHISAQFGVRTVPTVLFVREARPFHGFEGVQTDENIRKMFAQILPLSGKSPLEQASELLVEGKNQEALSLLKEAHQEDPQDMELSLFLAEVHISFNHLEEAQKVLETIPSEEQDQRYHDLLATIESHKQAADSPEIRQLLLEMASQPENAELALQLASKLHEVGRNEEALELLFGFLKKDLSAANGEVKKTLMDIITALGTGDALASKYRRHVYSLLY

SEQ ID NO: 7268 - protein, 286 aa, Xenorhabdus sp.
VKTVPQGYQWTVERFGRYTRTLTPGLHILVPFIDRVGRRINMMEQVLDIPSQEVISRDNANVTIDAVCFIQVVDPVRAAYEVSNLELSIINLTMTNFRTVLGSMELDEMLSQRDLINSRLLTIVDEATNPWGVKITRIEIRDVRPPKELISAMNAQMKAERTKRADILEAEGVRQAAILKAEGEKQSQILKAEGERQSAFLQAEARERAAEAEARATKMVSDAIADGNMQAINYFVAQKYTDALTSIGAADNSKVIMMPLDASNLMGAIGGIAELINESKKDRQDN

SEQ ID NO: 7269 - protein, 98 aa, Xenorhabdus sp.
MSWELQGILFALLTLLSAIAWRAWLRRHPQKSSDERLNQKNQQLIGQHARLTTDTENGYGRIKLADGSWRIHCDHELTANTEVEIIAVDGITLKVKPI

SEQ ID NO: 7270 - protein, 181 aa, Xenorhabdus sp.
MVDAAMATSAAPTFFQPYRIQVNSTDFGYFVDGGVFANNPSMTALTEALSLKGVSGPTDIRMLSVGTGDMSNGVTSINFDNYYAPLSWGANWWLWPLRWGNKDEIPPAALLMLIFETTAKMAEFQAEKILGKNYLRANFSLSKPFDIDNWQDIEILEAEVDKYLQTPDWERICNQVKRLWI

SEQ ID NO: 7271 - protein, 849 aa, Xenorhabdus sp.
IALQLSGLSCMKCVGKTQKALESVEGVVATEVDKQTARIYGKADENALISAVKQAGYHAESVMSSHLPKNEPLTTPEPEFLPAATDSTSIPITKSDKKTGSGASHNSDDSIQLLLDGMSCASCVSKVQKALQSVEGVKNARVNLAERSALVTGSASPDALVNAVIKAGYGAEIILDETERRERQQQIAQANMRRFRWQSALALIVGVPVMIWGMIGDNMMLTPENHTIWLSIGLVTLAVMVFAGGHFYRNAWQSLKNGSATMDTLVALGTGAAWLYSISVNLWPDIFPPQARHIYYEASAIIIGLINLGHALEQRARQRSSQALERLLDLTPPTARVITSEGEVSLPLADVEPDMTLRLVTGDRVPVDGEIIQGTVWLDEAMLTGEAIPQQKTLGDTVHAGTVVQDGTVLFKASAVGSQTTLARIINLVRQAQSSKPEIGQLVDKISSIFVPVVVVIALVAGAIWYFAGPAPQIMYALVIITTVLIIACPCALGLATPMSIISGVGRAAELGVLIRDADALQQASQLDTLVFDKTGTLTEGMPQVTEIHTFNGYTEEQVLLWAGALESGSNHPLAKAILLKAEDRKIESKQLTDVTQFRTLAGTGISGNIGNTALLLGNLSLLEQNQVETSTLQQQVVQQAEKGITPVLLAVDGKIAALFSIHDPLRQDTISALQRLHKQGYHLVMLTGDHPATAHAIAKEAGIDQVIAGVLPDGKAATIQTLQSEGRKVAMIGDGINDAPALAQADVGIAMGSGSDIAIETASITLMRHSLHGVADAAELSKGTLRNMKQNLFGAFIYNTLGIPIAAGILYPFTGTLLNPVIASAAMALSSITVVSNANRLLRFKTKD

SEQ ID NO: 7272 - protein, 251 aa, Xenorhabdus sp.
NYPYPAYDVTLPENKQLHIVGSIHMGTENMYPLSEVLLEQLEQCNALIVEADITQSGSPFQQILPEQAGLSQRLSSEHFSFLQQYCHEIHQPIELLDRLPSWQVALILQAAQAKYLGMSPQYGIDYQLLNSAKAIDKDIIELEGTDKQINLLTELPNGGLSLLEDTLAHWHTNARALQTMISWWMNYKSDQKNPVLPQTFCDAIYQTLMTERNSQWSVQLRALPAGKYVVAVGALHLHGENNLLQLLQQQE

SEQ ID NO: 7273 - protein, 158 aa, Xenorhabdus sp.
MTPAIILLEKQKINFKIHPYEHDANEHNFGDEVVRKLGLDATKVFKTLLVSLNGNPKNLVVAVTPVAGQLDLKKVAKAFKAKKADMADPQLAQKITGYLVGGISPLGQKKRLPTVIDIQAEALSTLFISGGKRGLDIELAPTDLCQLLSGSFADIARI

SEQ ID NO: 7274 - protein, 810 aa, Xenorhabdus sp.
MIWRWFWREWRTPSLLIVWLSLTLAVACVLALGRIGDRIDQSVHYQSRDFLAGDLVLRASYPVDPSWLQLAQKKGLTLSRQISFSTMTYAGDVPQLTDVKAADKHYPLYGELETSPPGLKPEKGSVLVAPRLLALLHIKVGDSLDVGDTTLKISGELLQEPDSGFNPFQLSPRILINIDDAQATGAIQPGSRLTYRYMFAGSPDAIQSFQQLIDPELKADQRWLTLKQDNGALAKSIERAQQFLLLSALLTLLLAVAAVAVSMTHYCRSRHNLVAILKTLGAGRWALRKWIIGQWLVILLAATVVGSVLGLVFEAALIRVLAAMLPKMLPEAGMWPWVWAIGALLSIALLVGIRPYRQLMATQPSRVLRSGVSASVWPLRYYLPVVALIIAGGLILLAGTEPLLWSLLAGVPVVALLLGGLGWSGLWLLRRITFRQLSLRLAVSRLLCRPFQTMTQLAAFSLSFMLLALLVMVRGDLLNQWQQQLPPDSPNYFLINMTQPQLTSVDELLAQYDVKPTEFYPVVLARLTEINGQSALEWADKVHPKSTTVRRELNLTWKKELPPFNTLVEGNWPPQSKEVSLEQGVADRLQIKIGDKLTFTGDTRTFNVTVSSIRKVDWESLHPNFFFIFDKETLAQQPQTWLTSFHYVGNGKLLTEINRHFPTISMLDIGSMVKQIQGILQQVSRALEIMVVLVMICGGLLLLAQIQVGMSQRQLELVVYRTLGASKKLLRRTLWSEFALLGFMAGLAAAFGAEIALWLLQTQVFEFPWQPQWLMWLLLPVISSLLLSLCGGGLGVRLLRRQAQYRRLPE

SEQ ID NO: 7275 - protein, 228 aa, Xenorhabdus sp.
MAVECALKVHNLIKYVGEGEQVINILQGVELLVEPAQTIALIGESGSGKSTLLGIIAGLDDGSSGEVHLLGQNISRMNEEQRAQLRAENIGFVFQSFMLIPTLNALENVQLPALLRGESESQSRQQAIELLEQLGLGKRLKHMPAQLSGGEQQRVALARAFSTRPKILFADEPTGNLDRQTGERIADLLFSLNHDYATTLILVTHDSQLAARCQRRLRLVDGKLQEEA

SEQ ID NO: 7276 - protein, 117 aa, Xenorhabdus sp.
MALEEFTYIPRVNPIGDITQRVRTVQFGDGYTQRSGSGLNNEHQSWTVSFVGNLDYIEEIRQFLVRHAGYRAFTWRNPLSKLGLYVCQGHRITAMGMNSRQEQMYQLSAAFETSYQP

SEQ ID NO: 7277 - protein, 56 aa, Xenorhabdus sp.
MTFTFQNLLCKKEIYCAKNSENPKISKTNDALSSSLKADASSFREKDRHVSVALYQ

SEQ ID NO: 7278 - protein, 220 aa, Xenorhabdus sp.
MDDHPLEGVLITLGGIDTVYSETTDFYYHFLQELLSIPNLKNEKNITIAGGGRTIGNLKNILAETHPHIHVDCFSRQDFLKKLRRARKVLSNAGLTTFYECVVLNKDVFFLPPQNYSQQLQLEIYLQHYYPPEYGFLWQPEYGYPELPAYLSEREGLALTDKCIDLFINRPIERKRALEMIDQFLSKEKINAHFSRDIFEHNASDIIVEYIEKTFLTKRL

SEQ ID NO: 7279 - protein, 139 aa, Xenorhabdus sp.
MAVGHVWATDDGTAVSIWTAPGIEDAASVFVPLSVEFEKIAGERANIMQASEAIMAKERPDFPCWFLGVVAVDPDFQGKGLSRAVIDPGLERAEREGFPVFLETSDEKNVRIYERLGFEVTAEYPLPFNGPMMYAMLRQ

SEQ ID NO: 7280 - protein, 403 aa, Xenorhabdus sp.
MTKEIQRNWFEQYMVPCFAPAPFIPVRAKGSRVWDQDEKEYVDFAGGIAVNALGHANNELKETLSNQMENLWHIGNGYTNEPVLNLAKDLVENTFSDKVFFCNSGAEANEAALKIARKYALDKHGSHKSEIISFENSFHGRTLFTVTVGGQPKYSQDFAPLPQQITHLPYNDIEAIKAHISDKTCAVIVEPIIGEGGVIPATPDFLKALRELCDQYQALLIYDEIQTGIGRTGYLYAYEETGIEPDILTSAKGLGGGFPIGAMLVKQHVAEVFQPGSHGTTFGGNPLASAVAHKVLNIVNQKAFLAGVQERHQEFIRHMTDLNQRYQVFSEIRGKGLLLGAELADKYQGKAKTLTNLAAEEGLIALIAGPNVLRFAPALNIEQQDINDGFARLENALKRFVQE

SEQ ID NO: 7281 - protein, 276 aa, Xenorhabdus sp.
VSALEVAVGLEEPFYNYRVHKSVRSSRELGIYNSFETLIVGQDHTGYSELCTLFLDPAYHGGRNGIFLSRSRFLFISAFRHLFPKTIFAEMRGVVNEQGESPFWNALGQHFFNVPFAQADYLTGIGTKTFIAELMPFHPIYVPLLPEEAQRAIGQVHENTVPARAILEKEGFSYHGMVDIFDAGAILQAEIDDVRTVKASRLVSVKRKENAFRQSDGRLCIVSNLHFQDFKALLLNISDAIDSDELHLTGAEMEALQVEEGDLVRCAALFSEETSQ

SEQ ID NO: 7282 - protein, 492 aa, Xenorhabdus sp.
MSDQANYIDGKWVTGQGVQVVKHSPIDQQILWQARSASVKQVEEAGLAARRAFSDWAKLAVEKRIAIVQAFADLLAKEKETIARVISEETSKPLWETRTEVQSMIGKVAISIEAWQQRTGYSETAMPDGKAILQHRPHGVMAVFGPYNFPGHLPNGHIVPALIAGNTLIFKPSELTPITAEKTVELWIKAGLPAGVLNLVQGGRETGGALLDCREIDGILFTGSATTGFHFHRLLAGQPEKMLALEMGGNNALIVDDYDDLDAAVYTIIQSAFISAGQRCTCARRLLVKQGEKGDALIQRLTEAARQIVPSRWDAEPQPFMGGVISLAAAESLLNAQSGLLALGGKALLTLTQPDPHSTFMTPGIIELTGVSQVPDEEYFGPLLTLQRYDTFEEAISIANDTRFGLATGLISPDESLFLRLQEEARAGIVNWNKPLTGASSKAPFGGIGASGNHRPSAYYAADYCAWPMASLVTDKLSLPDTFVPGLDFFRS

SEQ ID NO: 7283 - protein, 447 aa, Xenorhabdus sp.
MSGIEANFDGLVGMTHHYAGLSMGNEASINHRGQQSNPRKAALQGLTKMKALSDMGLVQGVLPPQQRPDLSALRQLGFTGNDAQVLNKAAKYSPLLLSNLSSASSMWTANAATVSPSADSADQRVHFTVANLNNKLHRSLESVTTSRALKAVFSDPNYFVHHAPLPQHADWGDEGAANHNRFCGEYDEAGVQLFVYGRSAFRAGPVPERYPARQTLEASEAIARLHQLDERQTVFAQQNPIAIDSGVFHNDVIAVSNRNVFLYHEQAFLNQQSVLAEIEEKLAHLGQKLIPVEVPASKVSMQDAVSSYLFNSQLLSLSDGSMALILPEECRQNTNVSSYLQSLVATDESPISQLHFFDLRESMRNGGGPACLRLRVAMQEKELAAVNPAVIMTPDLYLSLTDWVERHYRDSLYTADLADPQLLTEVCSALDELTQILRLGSIYEFQR

SEQ ID NO: 7284 - protein, 236 aa, Xenorhabdus sp.
MRESKRYIHNDLNRMFGGRYQNFPSGNETQRAVELESVIQRFFQEPAVMASTRRWHLDLHTAIRGSCHEQFALLPFQQREYSPDLLQWLEGSDIDAMVFHKSEGGTFSQFTSQYFNVDSCTMEVGKVYSFGQNDLAKFSNITTALQKLIAGVFSVKRQKPEIKRYRAVDSIIKQDSSFRLHIPEDTKNFTALPDGFEIASQENQSWKITSPANFILFPNANVAIGLRAGLLLEQLT

SEQ ID NO: 7285 - protein, 472 aa, Xenorhabdus sp.
MTNTVKTPAEQSAGAQKLHRGLGKRHVQLIAIGGAIGTGLFMGTGKTIAVSGTSIILTYLLIGFFAFMVMRAMGELLLSKLDYRTFADFVADYLGEKASYFLGWTYWMSWVVSCIADVVVCGGYIQYWFPDISLWFTALFILGLMCLCNFFSVRLFGETEFWFAMIKVVAIVALIIVGVGMVAIGWTSPNGVTASVRHLTNPEVFLPNGVFGFLAGFQIAIFSFTGIELVGTVTAETKEPEKILPKSINSIPIRIIIFYVFSMMCIIAVTSWPHISPEVSPFVTLFALAGLPAAAAVINFVALTSAMSSANSGLYACTRMLYGLSTEKLAHGWFGRLSVNSAIPVFSLIFSVVCMASGVLLLFIVPDVMKLFTIVSTVAAIMVVYSWCMILLAYLAYRKKRPDLHEKSIYKMPMGIPMTWCTLIFFAFTVVIMIFDYDTRIALYGTPIWFVILEVLWRMRKKRKEYKNSEVY

SEQ ID NO: 7286 - protein, 155 aa, Xenorhabdus sp.
VFAWRHGSDSQSGQIYREWDTSQPDISDIEGLSKFIVSSVNRDLLAIKLINKSGINQVFRANIRTYTIPDPVDCLSGGDYEVVGLIPKDGQMYITSVVVFDQNNIPVTQGAVYFKYNGTDIDIITYNETKPLYMKFEKEDNYRFNFILENLPVNQ

SEQ ID NO: 7287 - protein, 465 aa, Xenorhabdus sp.
AILASGVCLSAQANNSADNIMAEKRSAHGDLTQFGGARRLTQDQTDALKAALNNTKAKNVILFIGDGMGDSEITLARNYAQGAGGFFEGIDALPFTGQYTHYSLDKETKKPDYVTDSAASATAWASGVKTYNGALGIDVVGKPHQSLLELAKQNGKATGNVTTAEIQDATPAALYAHITNRKCRDPQETSEKCPTEVLDKGGRGSITEQLLTARADVTLGGGAKYFDQQSTAGANKGNTLKQQALDQGYQWVTDIKSLSNIKEASQKKPLLGIFNNGNMDVVWEGPKAVYHGNLNEAPVKCQINAKRSSDEPTLVQLTEKAIDLLKTNKNGFFLQVESASIDKQDHEANPCTQIGETVALDEAVQAALKFARQHEDTLVIVTADHAHSSQIIANDVKSPGLTRSLITKDGAVITVNYGNAEEGKQNHTGTQLRVAAYGPHAANVVGLTDQTDLFFTIRDAMGLKQ

SEQ ID NO: 7288 - protein, 511 aa, Xenorhabdus sp.
VYQFSDFRLTEGNIMSDITLLASVTAFLQRSHGHYINGQSVRGQGDKTFSVVNPASDEMIATVNQGSEVEANAAMQAASDAFHGSWARTSPMERGNCLIRLADLLQKHSEELAQLETLCSGKTIQLSRMLEVGASAQYLRYFAGWSSKISGETLNVSLPSFKGEEYTAFTRREPVGVVVGIIPWNFSIMIAIWKLGAALACGCTIVLKPSEYTPLTMLRVAELAKEAGIPDGVINIVNGSGASVGTKLLTHPLCSKVSFTGSVPTGKLIGKSVMEQGQFRATLELGGKNAAAFLSDVPVEKIVDGILEAGYLNQGQICAAAERFYIPSVHMDAVLKLLSERLSTMKIGSPLDETTEMGPLANKEHYEKILSLFEKARQEGNEIVYGGRALEGKGFFVMPTVIRAKSADDTLMKEETFGPIGTFLSYDDEEELIAMMNATPFGLSASLWTNDLSKAMRMIPRIQAGVLWVNMHTHLDPALPFGGIKSSGLGREFGKAFIEYYTELKSVMIRY

SEQ ID NO: 7289 - protein, 107 aa, Xenorhabdus sp.
VTNLGSVVVEGDPQASVAMVHGEPNDNLTCGIFACTRGKFKMVYPFDEMATVHEGSVKLTDVKTGVVAEYHKGDSWFAAKGTEVLWEITSERFVKHYMACINSQIFG

SEQ ID NO: 7290 - protein, 433 aa, Xenorhabdus sp.
MNNQIDSLTYYAATKKYDLRFPTLTEDLDVDVVIIGGGFSGVNTALELAEKGITNIAILEGRTLGYGGTGRNGGQVMAGIGHDLDRIKHHVGEKGLETIFKISNMGAGIIRERIAKYNINADFCPGYGYLGYNSRQDKTLQGWLKEFQASCPDNEIELYTGSDVKKVIGSDLFTSALKHMGGGHVHSLNLLLGEAKAATEYGVKIFENSQVLNVEYGPRVTVRTAMGSVRANKMLWACNAFLNGLEPTIYKKTINTYAFQLMTEELSDEMIERVSPIHGAYSDISPIINYWRVTKENRLLFGSATQYLEYIPSDLKAWNRNRMLDVYPYLKDVKIELAWGGPMCCSVSLFPQIGSLPQHNNVFYVQGYSGFGVTPSHIICKVLAEGMSEGSDRYSLLSSIPHMNVIGKEQLRHVYLSLGKSWHQLSGYWKGRR

SEQ ID NO: 7291 - protein, 101 aa, Xenorhabdus sp.; identical to SEQ ID NO: 7150

SEQ ID NO: 7292 - protein, 223 aa, Xenorhabdus sp.
APPENEQQLFKRAQSLAGLTLGELATQACIPIPPNLKRDKGWVGMLLEYYLGASAGSKPEQDFEHIGVELKTIPVDRKGTPLETTFVCVAPLTGNSGITWENCHVRRKLSRVLWVPVEGEREIPLAERRVGSPLLWSPNPVEEELLRCDWEELMDLIVLGKVESITARHGEILQLRPKAANSRALTEAIGEYGQPIMTLPRGFYLKKSLTAPLLARHFFIGSD

SEQ ID NO: 7293 - protein, 391 aa, Xenorhabdus sp.
MSYQAATVLHAITLMAFLAASSAPTPLYRIYQHEWGFSSTLLTVIFAAYALALLLALLIAGRLSDHIGRRPVISLALLLQIISMSTFLLASDPAWLVGARIIQGLATGLATASVGAALLDMNRERGALINSIAPMLGMAAGALGSTTLLVFAPGPLHTIYVLLLIVFLVVLIFTRLAPETVQRRSGAWESLRPRIMVPVQARNALRAITPANFAVWMIGGFYLSLMPSLIVATTHTTSPWMGGLSVAALTLSGAVAIIAARKLTSFMTLLSGELALATGLLLILLAANREYVMLLLTGSVITGFGFGATFLGAIRTVLPLAEPHERGGLMGAFYIESYLANSVPTVAIGYLAHQSGLLVAVNVYGAVIIALVLLAILLTILNKNISIPLRK

SEQ ID NO: 7294 - protein, 70 aa, Xenorhabdus sp.
MNITVPDPLSAEETQILAASVGLILDAERAQYIAGALHHIRTSIARLDELPMDDADIPAPTFNAGEERKI

SEQ ID NO: 7295 - protein, 460 aa, Xenorhabdus sp.
MIDLKNLTISQASQAIAAQTLSPVELVDAALANIEIAEPEINAFVSVWAEEAREQAKQAEREISQGKYRGPLHGIPLALKDLFDVAGKPTTASSKVRAEHIAQSNSAVTDALHRAGAILLGKTHTHEFAFGVITPQTRNPLDTRRIVGGSSGGSAAAVAYGGVLAAMGTDTGGSIRIPAALCGIVGFKPTYGLVSCYGVTPLAWSLDHAGPMTRTVEVAGLVLQALTGFDGRDPASRQVPDTNYADFSKQEIKGLRIGIPQNYYFDQVAESVIAAVKQTAERLKQQGAEVTTVNIPLTDYLMPTQWGITVAEAASIHSRTLRKSASLYGDDVRTFFETGQLLPAGDYLKAQRARRMICQQWNALFNDIDILLTPTVPETAALVGQESFIWSDNSEENVTNAYLRLCIPANITGLPALTLPVAKDKQGLPIGVQVIGRAMDDATVLRVGHAIEIAGKTESV

SEQ ID NO: 7296 - protein, 311 aa, Xenorhabdus sp.
MYNNMLTKEAQQASLILYATEMNSQYYNNPTPPADPRLTEDGWDLVAYISGNDLSFSVNPKNNQQFLIMLPNHVCYGYIAKNKKTPAEYVIVIRGTDSSNLFEALHDIVPVFTSPWADTPQQKVSMGFYSVYNSLKLTIVEPESKDNYSHLRFPNAVAQFIGINTAYTILGHSLGAVIATYLMRDIPLLGDKHKASLFASPRAGNHEFVSYIDNHFANYETFRYENDLVPHLPPDIPFILEYESLSKSTILKTSDGLNITDSLRCNHYLISYIALLDPEQFKKLLNEPQDADSEDVKKTAKCISLTPPSNQ

SEQ ID NO: 7297 - protein, 149 aa, Xenorhabdus sp.
MISSFFSPVLRAQGEAHLLFHMGLGAKGQFFVGGTMQNQGDEPVAGGYLAILPLNTTCDPQSLIVYSFDSLAPGEKKEFRIPVDAPFSSYHLAGFGAYDDMGFSLPTVDETEKVIKDRESNERKTCQSAREAKVINGPNTEEKIHKIRS

SEQ ID NO: 7298 - protein, 116 aa, Xenorhabdus sp.
VGIDIEKEIKQETIDSVSASIINETEKELLAKSPLTFIQAFTLAFSIKESLYKALYPHVKQFFDFHAAEIVEIDCTHHTVTIKLLKTLTDDYQAGSLFHGNFVLMPQQQLLTYIVG

SEQ ID NO: 7299 - protein, 303 aa, Xenorhabdus sp.
MNNIENLSSMVIFARVVETLSFTEAAKSLRLSKSSVSREIAQLEIRLGTQLLNRTTRKIQVTEVGMSYYQYCQRILNEAKNAERFIRNFHEEPMGSLRLIAPVSFGSQCIVPALNNFVAGNIHVSVDLELTDRIINMEKDQCDIAIVVGRETPDHPLVMPLIDITWGLYATPDYLSQFPAIERPEDLPRYDYLLFRGPAHTISLPFQKERNKFDIEVRSRFRINNSVALMSSALAGAGIAYLPDYITHESVTAGKLIRLLPEWDMDIYQSWILFKSEETLSSRVRLFANTLQHKLMNQMQRTE

SEQ ID NO: 7300 - protein, 201 aa, Xenorhabdus sp.
MLSTKRLFDEIPYEKQFEATVIYVGDDHIVLDQTLFYPLSGNQDFDIGSIGEYPVTSVHVDNTDEGKLDFSAPIRHYVTTDNFSIGQKIEGQIDSTRRLNTMRLHTASHIVEFFMRKMPTFLSIEGSFVNNEKDRADYFLSQNIDPQSLSALEQEVNRFISQGHEIVFKYQDGIRLWCCNEIEMPCCGTHVSNTKEIGTVK

SEQ ID NO: 7301 - protein, 135 aa, Xenorhabdus sp.
MLETMYDTDNGIGLAAPQVGRRESVLVIDISPERNQPLVLINPKIVEKERKVVNQEGCLSIPGYYADVERFEKVKVEALDRNGQAITVESEDFLSIVMQHEIDHLHGIIFIDYLSPLKRQMALKKVKKYLSSRVS

SEQ ID NO: 7302 - protein, 184 aa, Xenorhabdus sp.
MTHRAAPRPGGRSARVQAAVHQAVRELQQELSRTELTVPAIAARAGVTPSTIYRRWGDLSQLLADVAVEELRPDHSPAETGSFRTDLLTWLEQYFEEMSSEPGRAMLRDVLGTPGHEYAGKCDGCIRQQIEAICQRALEKGEKPISVDLIISGVVAPLMYRILFANESPTSEQIHTFFEQLEAR

SEQ ID NO: 7303 - protein, 386 aa, Xenorhabdus sp.
MTKFDTKSVHAGYVPDHTGAVMPAIYATSTYAQPAPGQHTGYEYSRSGNPTRDALERAIAELENGSRGYAFGSGLAASSTILELLDKDSHIVAVDDLYGGTYRLLEKVRRRTAGLRVTYVEAGDTAALEAAIQPDTKMIWVETPTNPLLKLADLATIAQIAQHHKIISVADNTFASPYIQRPLDLGFDIVVHSATKYLNGHSDVVAGLAVVGNNAELAEQLAFLQNSIGGILDPFSSFLVLRGIRTLSLRMERHISNAEKIAHWLEQQPQIEKVFYPGLDSHPQHELAKRQMKGAGGMISIVLKGNDDATHRMIKALKLFTLAESLGGVESLVGQPFTMTHASIPLEKRLVAGITPQLIRLSVGIENVDDLIADLTQALSAANLSI

SEQ ID NO: 7304 - protein, 456 aa, Xenorhabdus sp.
MSAPRSVLELIGNTPLLELTHLDTGPCQLFIKLENQNPGGSIKDRVALSMIEQAEKQGLLKPGGTIIEATAGNTGIGLALVAAMKGYKLILVVPDKMSREKIYHLRALGTDVRLTRSDVGKGHPEYYQDYALRLSKEISGAYYIDQFNNSSNSLAHMTTTGPEIWQQMEHDVDAVVVGVGSGGTLGGLSQYFREVSPDTRFILADPKGSILADYVEYGHYDEAGSWFVEGIGEDFIPPLGDFSNISHAYRITDAEAFSCARELLLQEGVLVGSSSGTLLAAALRYCRAQKTPKRVVTLACDSGNKYLSKMFNDYWLLEQGLRSQQKENDLSDYVTYRYRDGATVFVSPQDTLQIAHGRMRLYDISQLPVLDNDQIVGIIDEWDLMNAIQADSHNFSLSVSQAMTSQVKTLHKNAPLEQLVATFDAGHVALIVDDNKHFIGLVTRTDVLNAWRQQLN

SEQ ID NO: 7305 - protein, 171 aa, Xenorhabdus sp.
MVQISGAKRILEIGTLGGYSAQYMAKALPDDGLLITLEKNPKMVQIARRNIELAQLTNKIEVIEGDANETLPTLSERAPFDLIFIDADKRSSQIYLDWAIKLGRPGSIIIMDNVVRGGAVIHDQRDEFAEGIHQTLDKILNRPEITVTALQTVGEKGWDGFALLRINDDVN

SEQ ID NO: 7306 - protein, 385 aa, Xenorhabdus sp.
ALIQKVTESFNTVFHSSPTHFFQAPGRVNLIGEHTDYNEGFVLPCAIDYQTVAAAAKRDDTLIRVIAVDYGHDRDEFDLSQPILFHQDKMWANYIRGVVVMLIQHGYLFGGMDIAISGNIPQGAGLSSSASLEVVIGLTINVLYQLDISRKLIAINGQQAENQFVGCKSGVMDQLISACGEEGHALLIDCRTLEIQAVPMPENITVMIINSNRQRGLVDSEYNIRRRQCEEAARILGVRALRDVSLYDFSAKQKQLDTLLAKRARHVVTENARTQAAVAALRSGDLSRLSQLMAESHLSMRDDFEITVHEIDVLVESVKNVIGERGGARMTGGGFGGCIIVLLPSDLVSDVRQAIKSEYQIKTGLQASIYICQASRGASQLINQA

SEQ ID NO: 7307 - protein, 347 aa, Xenorhabdus sp.
MQFNQADYPHRRYNPLTGQWIIISPHRLKRPWAGVEKLLQHPVSPGYDKQCALCPNNTRASGDINPDYQDIYVFQNDYSALLPETPAIATADDPLFISKPTRGTCRVICFSPNHSKTFPELSLTNIRRIIDVWNSHIEELGQRYIWVQVFENKGEMMGCSQPHPHGQIWASDFLPNELTRKDELLRQYYDQHGSNLLLDYARAEQKNGVRTIVDTKHWLAVVPYWAVWPFETMLLPKSPVRRMNELTKEQRDDLAVAMKKLTCRYDNLFQCSFPYSMGWHFAPFFTNKQTDIEHWQLHALFYPPLLRSATVRKFLVGYEMLAESQRDLTPEQAAQRLRDVSDVHFRS

SEQ ID NO: 7308 - protein, 339 aa, Xenorhabdus sp.
VEILVTGGMGYIGSHTCVQMIEAGMTPIIVDNLCNASQEVLARIEALTGIRPLFYQGDIRDEAFLDSVFSRHAIESVIHFAGLKAVGESVEKPLEYYDNNVNGTLVLVRSMHKAGVKSIIFSSSATVYGDPEIVPITEQSAVGNTTNPYGTSKYMVERCLSDFHHAESDWSVVLLRYFNPVGAHPSGTMGEDPQGIPNNLMPYIAQVAVGRREKLSVYGDDYPTPDGTGVRDYIHVMDLADGHIAALNAVGKKSGLHIYNLGTGTGTSVLDMVAAFGQACGKPVPYEICPRRPGDIAECWSSPEKAERELGWKASRTIVEMTEDAWRWQSQNPNGYKAG

SEQ ID NO: 7309 - protein, 188 aa, Xenorhabdus sp.
MNDAVLNEQKENIIRGQVYILEDNIDTDQILAGEYIKVNPSSPEGYAQLASLAMCGLPEGSLPFIDEEKGKAKYPIIVAGQNFGCGSSREHAVVALGASGVKAILAQSYARIFFRNCVSTGELLPVAAQERLCDSLVTGDSIEIDIENQTVTILKSGEKYPTDPVGELANIVAAGGLFSYARATGRIK

SEQ ID NO: 7310 - protein, 436 aa, Xenorhabdus sp.
GQCEMNQTMTQKILARASGRKQVTPGEVVWAKVDILMSHDPCAPGVASVFKKEFGQDARIWDPTRFIMIPDHFVYSADPQANQNIRVMREFAAEQNVKYFYDVGTPNYKGVCHIGLAEGGHTRPGEVLLGTDSHTVTAGAFGTFAIGLGITDAAYAIGTGEIPLKVPSTIRVNFTGTKPAHVLAKDMILTVLSELTVDGATYQAIEFGGNVIDELSVEERMTICNMVVECGAKNGIMVPNQATLDYLAERNEMPFEIVYPDEDAQYTRVLNIDVSDMQPKIAKPHSPDNVVSIEKVANVAISQAYIGSCTGGKIEDFIAAARIIKGHKVKIPTYAVPATKEVFHKTITTQIEGVSVYQILTDAGVKLSAEAGCAACCGGPPDTFGRVNDPISVISTTNRNFVGRMGHKRANIYLASPYSVAAAAITGQITNPGEFL

SEQ ID NO: 7311 - protein, 120 aa, Xenorhabdus sp.
VIDQPLNADIQVKTAGSLRKKRIQFFSKQEDGLKWIEQLEQYLVIRQTLEELDFRSCSLQIRKGKWRCEIEHFAASEIVSRLPATRRYLRLTSEQRHRLLSTLHLIHQLMLQGIGKKPYT

SEQ ID NO: 7312 - protein, 439 aa, Xenorhabdus sp.
VMQAQLTTFAEAAAILPTSGSVYDYISCGMGRFWAITGALSAYLIVHVFAGTAETILSGIMALVNFESLNTVMESNNASWMVGVGLVITFGLLNAFGIEAFSRVEIVLTFAMWSTLVIFSLCGLLMPFHTSVDGWFGESMNIADPTVILSLIGMAMFMFMGCELVTPMAPEIKNSAKVIPRAMAIGLCGVAFCMFMYGAAMTHQVENVIVDPANNVRLLETPMAIPAFAGQVMGDFGKYWIGFGLLLAGAATINTLMAAVPRILYGMALDGTLPRIFTYLHPKFKTPVFGILVAVLIPCIHAFAIQGDLNRIMPLVLAAVCSWGTAYLLVTISVILLRIRRPDLHRAYKSPFFPLPQIISGVGIVIALIYITPPGMDKADVYIPFMIMLGLTAAYALVWTIFVQKVNPFKPVEVEDVLSKTFSETELKEIKLEPLRSLR

SEQ ID NO: 7313 - protein, 222 aa, Xenorhabdus sp.
MTSDAKGLERKFEAKQRNRNKPGVVLCGSLEQLKELAQLNPEIEELYQKHWDADVLLGCILPWKEEAVNRIPDDGSKELMMDGRGTSCFVIKFGKPGEILAKELWEKYGKFSFASSANPSGKGNRGLVECIGERIEERADLIITANDYVKSIQPNETEQTRYEQGVMISMVDDNGKLVPTQNGQRDIIPCPVLIRKGLDVHKIMVIMSDIFTTWDYRHGNYY

SEQ ID NO: 7314 - protein, 161 aa, Xenorhabdus sp.
MIITSTEFKNNDFLSKEQEFNEFGGNGGNRSPELAWTDAPAGTKSFAVTVYDPDAPTGSGFWHWVAFDIPLEIQALSPDAGRSDGSKLPAGIIQSRNDYGQFGFGGACPPEGDKAHRYIFTVHAMSVEKLGINAEITNAVTRFMIYANSLATATITGYYQR

SEQ ID NO: 7315 - protein, 306 aa, Xenorhabdus sp.
ISSLGNQIDNSLVSNAFGFLRFPLNFQPYSGDAEWVITGVPFDMATSGRAGSRHGPAAIRQVSTNLAWESSRWPWNFSLRKRLNVVDCGDLVFNFGDAQDMSDKLQAHAEKVLASGKKMLTFGGDHFVTLPLLRAHAKHFGKMALVHFDAHTDTYPNGSKFDHGTMFYHAPNEGLIDPAHSVQIGIRTEHDTDNDFTVLDAGQVNDRSVEDVVDQIKSVVGDLPVYLTFDIDCLDPAFAPGTGTPVIGGLTSDRALKILRALQPLNIVGMDVVEVAPSYDQSEITALAAATIGLELLYLQASKKAV

SEQ ID NO: 7316 - protein, 167 aa, Xenorhabdus sp.
LPASCVAKNSFIKPCVDNQAIAGAFARAASRYDATAKLQQQTGEYLMKMAQPEDTGNWVLDAGCGTGFFSEHWKQKGKQVIALDLSAGMLSHAKGLQVADYYLQGDIENLGLADNSVDVCFSNLAVQWCNELPRVLQEFHRVTRPGGLILFSTLAQGSLWELEAACL

SEQ ID NO: 7317 - protein, 100 aa, Xenorhabdus sp.
KTQRDKTQAQLEKATAGMIEGIYGAGRWFEHQKKTLERTVELIRLLESDDIEDGAVIRLRNDQEFSPLKREMAAKIAQPKVESDRSDKDEMRAWLGGDFG

SEQ ID NO: 7318 - protein, 212 aa, Xenorhabdus sp.
VKEVIEQHISEFENKETPLVIDLTGDGITTISENGNIFFDHDNNGIIESSGWIESNSAFLVWDKNKDGKINNGNELFGNNSILKNGIKADNGFTALTDLDDNGDGIFDQHDSLWDSLELWVDSNHDAITDSGELYKLSESGISSINLAYKEDGFKDINGNVHELESTVNWNNGSVTKIVDVYFAVNKNNMIESITSHVDIVGVNETFSEAIL

SEQ ID NO: 7319 - protein, 585 aa, Xenorhabdus sp.
PKGEITDVIRARSKVFWTIGLFTVFINLLMLAPSIYMLQVYDRVLPSSNEMTLLMLTLIILGMFAIMGGLEYIRSMVVIRIGNQFDMCLNQRIYTASYESNLKNGSTDAGQMLNDLATIRQFLTGNALFAFFDAPWFPVYLCVIFLFNSYLGLLALVGATILISLAVLNQWLSKAPLAEASQLSLRSTNLASTNLRNAEVIEALGMLPALRHRWFGLHERFLNFQRIASERVASITALTKTVRMALQSLILGLGGWLAIEGHITPGMMIAGSILMGRALSPIEQLIQAWKSWNAARLSWQRLDTLLQAQPERKSGMSLPPPKGALLLENVSAMPPGIIRLEQDQASKNPHYVLQNLNFALNNGEVLGIIGPSASGKSTLARLLVGIWPTQEGIVRLDGADIYQWNKDELGASIGYLPQDIELFAGTIAENIARFHHADPEKIIEAAKKAGVHELVLNLEQGYDTIIGASGVGLSGGQKQRIGLARALYGNPSLVVLDEPNSNLDDLGEKALNRAIIQLRDQGKTVVIITHRPSLLSQTSKILFLVQGKMKMFGASQQVMAALSQSKPSAQQSSLQQQPKTVKHVS

SEQ ID NO: 7320 - protein, 441 aa, Xenorhabdus sp.
TNVKEAQHEASGLLPLDANRYLQIGWLIIGIGILGFFIWAAFAPLDKGVASSGIVVVDGNRKTVQSPVNGIIRQIQVKEGEHVRAGQILIQLSQVQANAQIDSLRQQLYTTQATEARLLAEQQGEESIVFPATLLTSQSEPRIHDILTLQKQLFLSRREMLQSDLAGMQQAEEGIDFQIKGLREALMSKQQQQASIKEQVANLRPLTEEGYFPRNRYLELLRNQSELSGSMAEMAGRMGQIEKQRQETQQRVIQRQADYQREVRTQLADVQVLVNELKNKLETAQFDLSHTFITAPVDGSVVGLAVFTQGGVVASGEKLMEILPTQSALEIEARLMVNLIDKIAVGQDVDLMFTAFNQSLTPKVTGNVTVVSADRLVDNITREPYYQMRVRVTPEGMEKLVGLNMKPGMPVEVFVKTGARSLLSYLFKPLMDRASTSLTEE

SEQ ID NO: 7321 - protein, 431 aa, Xenorhabdus sp.
ALSLTEAYALALQNDPAFQMAIKEWEAGQEENNLGLAELLPKLSFSYQNAPKNWQKMESHSENRLGKRIKEEREQQYSSYNSAIILTQPLIDFEAWARYQTRQSYALISDARFRADSQQLAVRVINSYIAVAYAQDRLAQMTQQRIAYEEQLKHNQKLFSSGEGTRTDVAETQARYSQVFANELTVKDELDAAIRDLQLLVGIPLPTDLPVNRLSDTPKFKIIKLDLKNYTDWEQLALRHNPQLMAARQKVEAAHHDIERNRSGLLPKVELYASHNENKSSSDNSIDQKYRTNSVGLRVSMNLYNGGGTSAALRQSVANYGRTKYEMDAQSGNILNSLRKNYNACSNSEKRIQAYETGVKAALLQVSSTRKSVLLGQRVNVDILNAEQLLYTARQDLSQAKYDYIKAWIGLLSESGQLNDEHIKLITHYFG

SEQ ID NO: 7322 - protein, 336 aa, Xenorhabdus sp.
MARYSRRAGFILAGITMILGGFISAISIYLGSFILLLGGHFLIGISMVGVNFLRYAAAESVPKNRAATASSILLASGIIGVIIGSELYGKENNLRFELPFVGIYLIISAIGGCAALAFSLLHGGFRHSIYQIDSDVSKTSGFAFIISNHALFFGIVAMVLGHAIMIIVMSAASIASAGYGLGNSETGMLIGAHLVAMFAPGIITGMLISRMGANRIILLGAILNLAGFLTGLISETNMIILGVPLIFAGLGWNFMFLGGTHIINGMSDGMDKVRVQGARETLLAFVSMVFAFASGGIYVLLGWMGLIFVVTIMTLLTIALLFIHAYLMPNIVDKSV

SEQ ID NO: 7323 - protein, 550 aa, Xenorhabdus sp.
EGVTFTLNKGDKIGLIGHNGCGKSTLMKLLSGNLEDYGGQMTVANQCVLAYVEQHLPLSLHDATLIEAIAEKIKVDEIWRAELLLSELGFSQQDWQTPIGNLSGGQHMRLLLGRAVIQQPDLLLLDEPSNHLDLTSLLWLESFLTQWKGSFVVVSHDQTLLDKVTNTTWIMRDKTLHHFGMACSQARQALLERDQADLQRHASEQKEIDRLEQSAERLAVWGKVYDNPDLSRKAKTMQARKQRLAEQQTKLTQGTPWRLTLQGDSLPANRLLNIEQMAVMPLGTDVVLFNVLSKQIKSGDRVAILGNNGSGKSTLLKALHQEYLEKTLQNVDYHPQCRLGYYDQSLEQIQDDDTLSDALLRFAPTIDDQRKRALISAGFEYKRHQQKVASLSGGERARLLFVGLTLARYHLLLLDEPTNHLDLEGKEELFDTLKEYKGGALIVSHDRSLIEQSCNRFWLISDGELAEYHNVEEIYALLERGNSSFKPQQQCIDRKQQKTTASGWNEEVLLQRLIELERLLQEDLNRKSKHQKPALQEKWRQEIEVINRQL

SEQ ID NO: 7324 - protein, 282 aa, Xenorhabdus sp.
VGSEQKNHQQTPQIMLHTHHTFSDPVDFDLVFLPPMWGNPFPAMGNREDIFAWLRRQKDNNAVIVATGTGVFWLAQAGLLNGKTATTHWSFYDKLICGFPDVKVNRKAGITYNDNIYCVRSINSQTELLVYLISQFFGLKIARVIEKHFMHEVSDFQSEPFFQMGGNTQFNEVVSIAQSYIQKNITSPITIKEIANYAGVSERTLTRNFMAQIGVSPHKYMLNYRLSTAKQLLKDNNLNLLNVAQLVGFRDPHYFSKVFEKHFELTPVAYRNLVKAKAFRAD

SEQ ID NO: 7325 - protein, 222 aa, Xenorhabdus sp.
MVDGNGATLTGLLTHAGGSYSCRTGEQLKAAAKAECDAVRQAARRIREAGIACPILSVGSTPTAHYVEDLTGITEVRAGVFSTFDLVMKNVGVCTLDDIAMSVVTTVIGHNKEKGWILIDAGWMAMSRDRGTAEGPIDYGYGQVCNLDGHPYPDLCVSMTNQEHGIIVLPSESSMKTEDFPVGMRLRILPNHACATASMHLQYQVLKQGSSEQETWHRITGW

SEQ ID NO: 7326 - protein, 581 aa, Xenorhabdus sp.
MSKLPVIVGLGGINAAGRSSGFHGYKRIVSNSLNDTVMKDTWSDLCHRMGIISDTGSVTASQIEQAKNGTLIRKITLFDPHNVPVNKIITTSDKDSVQLLQPAYTSLSVSSAGQIPEGFEMGDLYHAHHHPRGLRLTVYGASDLLNSIGISWSEISALVDPDQISVYASCAVGQVDQFSLSGLIGNRLNGLRASSKMLPLSLPDMPAAFINSYIINSIGSTSANIGACASFLYNLKQGVNDIRQGKAKICLVGCAEAPVVPEVLEGFSAMGAMAEDHQLCKLDGTDTVNNRRACRPFSTNVGLTLSEASQFVLLMSDELALQCGANILGSVPDVFVNADANKKSISSPGVGNYITMMKAASLTNSILDGKLQHSYVQAHGTGTPQNRVTESHILNEVAKVFGLSHWDVTAIKSYVGHSFSASAGDQLANTLGVWRYGWIPGIKTIDHIAEDVHASNLNILMQDKFAGEQGNDMRATIINSKGFGGNNASAVVLSPQQTMQMLTKKHGNAAISSYHHINQPVKEISEQQDQAICRGEESVIYNFGNSVLQPSDIELSRQEVKLAGFKQTIKLPNADEFSEFL

SEQ ID NO: 7327 - protein, 421 aa, Xenorhabdus sp.
NTFSNPTSVPDNYREKIRQMKPILREQIGDVETLFLQVCDKIEKELTEAKKDEKNLGSAWPELHWHDLAEDKVSEETIQKIKRRGCLVIRQNFPHSQAIEWDKSMLDYLDINEFDRLYQGPKDNYFGTLKTSRPEIYPIYWSQAQMQARQSERMALAQSFLNHLWKFESTGVSWFNPNVSMIYPDRIRHKPPGTNSKGLGAHIDSGSLERWLLPAYQNVFKNIFTNRFAEYDPWDAAYRPDVNEFDHKTRCSVFRTFQGWTALSDILTGQGLLHVVPVPEAIAYILLRPLLNDVPEDELCDVVPGKALPISEQWHPHLIRGLCSIPALQAGDSVWWHCDLIHSVAPVENQQGWGNVMYIPAAPLCDKNLAYAHHVATALDEGISPADFAPEHYEKNWKNRFTSAELNTIGLQGLGLKNKAF

SEQ ID NO: 7328 - protein, 159 aa, Xenorhabdus sp.
MTSEPVTCKEEAHRILDYYEKRWLIEEFHKAWKSGGTQVEALRMQCKENLEKMVVILAFIAVRVHQLRYVGLNKSEAEKQSCETLLSPLAWKLLWAKQEKKKLPKTAPSVYWAYINLGKLAGWYDSKRNGRVGWERLWEGWFMLQTILDGYLLSKSLDL

SEQ ID NO: 7329 - protein, 92 aa, Xenorhabdus sp.
MQKLKRWVDQEKKNETNAWSLVVKLSVLKAYIAFCDIKKFDPFSQAGYLSYAGNSGELRRLVDIANEPKKYQFQYHNGEEFGLLESSALQKR

SEQ ID NO: 7330 - protein, 183 aa, Xenorhabdus sp.
MRLHEGWIVDARKVISPHYDLRPAGEIPSLLVIHNISLPPGKFGGPYIDQLFMGTLDPNEDPFFQEIKGLRVSAHCLIRRDGEVVQYVPFDKRAWHAGVSCYCERETCNDFSIGIELEGTDYEPFTEIQYTKLAEVTELLISHYPDIRNNITGHSDIAPGRKTDPGPYFYWEQYRQLLKERVG

SEQ ID NO: 7331 - protein, 162 aa, Xenorhabdus sp.
MTKDDRLREIQNALIWINFRYYLAPIFWLVVMGEFGPAILMGYCFLRAYQRWLAQCRTSVQRAQSGVDALLNCLDWVPARLAGIAYALLGHGEKALPAWIASLSDLRTSQYKVVSQLAQFALSKEPHLDLLNSPLAAVKIAKKATFTIVIIVALLTIYGALA

SEQ ID NO: 7332 - protein, 254 aa, Xenorhabdus sp.
MAYSKIRQPKLSDVIEQRLENLILEGSLRPGEKLPPERELAKQFEVSRPSLREAIQKLEAKGFLFRRQGGGTFVQNNLWQSFSDPLAQLIAENQESQFDLLEARHALEGIAAYYAALRGTDEDFKRIKESHLAIQEAQQSGNIGAESDAVLQYQLIVTEAAHNVVLLHLLRCMIPMLEQNIRRNFEFIYTRKEMLAAVSDHRAAIFHAIMAKEPEKAREASHRHLSFIEEVLLDLTREHTRRERSLRRLQQHQE

SEQ ID NO: 7333 - protein, 887 aa, Xenorhabdus sp.
MSDILKNDVDPIETRDWLQAIESVIREEGVERAQFLIDQVLNEARKGGVSVAAGTASRDYINTIPVEDEPAYPGNLDLERRIRSAIRWNAIMTVLRASKKDLELGGHMASFQSSATVYEVCFNHFFRARNDNDGGDLVYFQGHISPGVYARAFLEGRLTEEQMNNFRQEIGGNGLSSYPHPKLMPDFWQFPTVSMGLGPISAIYQAKFLKYLENRGLKDTSKQTVYAFLGDGEMDEPESKGAITIATREKLDNLVFIINCNLQRLDGPVTGNGKIVNELEGIFAGAGWQVLKVLWGERWDALLRKDTSGKLVQLMNETLDGDYQTFKSKDGAYVRKHFFGRYPETAELVKDMTDDEIWALNRGGHDPKKVYAALNKAQETKGQPTVILAQTVKGYGMGDTAEGKNIAHQVKKMNMEGVRQFRDRFNVPASDEQVENLQYVTFDKDSEEAKYLHERRNALGGYLPSRRVNFDDKLEIPALEEFNSLLEEQSKEISTTIAFVRALNVMLKNKSIKDRLVPIIADEARTFGMEGLFRQIGIYSPNGQQYTPQDREQVAYYKEDAKGQILQEGINELGAASSWLAAATSYSTNNLPMIPFYIYYSMFGFQRIGDLCWAAGDQQARGFLVGGTSGRTTLNGEGLQHEDGHSHIQSLTIPNCISYDPAFAYEVAVIMHDGLDRMYGEKQENIYYYLTTLNENYHMPAMPEGAEEGIRKGIYKLESMEGAKGKVQLLGSGSILRHVREAAKILSDEYGVASDVYSVTSFTELARDGQDCERWNMLHPSEEPRVPYIAQIMNEAPAVASTDYMKLFAEQVRNFVPASEFRVLGTDGFGRSDSRENLRHHFEVDASYVVVAALGELAKRGEVDVKVVEEAIKKYSINPEKVNPRLA

SEQ ID NO: 7334 - protein, 621 aa, Xenorhabdus sp.
MSIEINVPDIGADEVEVTEILVKVGDTVEIEQSLITVEGDKASMEVPSPQAGVVKEIKVTVGDKVETGKLIMIFESATGAAEAVPVQQEAAPAAAPVAAESKEVAVPDIGGDEVEVTEIMVKVGDTITEEQSLLTVEGDKASMEVPAPFSGTVKEIKIAVGDKVKTGSLIMVFEVAGSGAAPAPAAAPAPAAAPAASAAKEVNVPDIGGDEVEVTEIMVKVGDTIAEEQSLITVEGDKASMEVPAPFAGTVKEIKIAVGDKVKTGSLIMVFEVAGAAPVAAPAAAPALAAAPAKAAPAPAAAKPAEGKNEFAENDAYVHATPVIRRLAREFGVNLAKVKGTGRKGRILREDVQAYVKDAIKRAEAAPAAAGGGLPGMLPWPKVDFSKFGEIEEVEMSRIQKISGANLSRNWVMIPHVNLFDEADITEVEEFRKQQNKEAEKKQLGVKITPLVFVMKAAAKALEAMPRFNSSISEDGQKLILKKYVNIGIAVDTPNGLVVPVFKDVNKKGIMELSRELAEVSKKARAGKLTASDMQGGCFTISSLGGIGTTGFAPIVNAPEVAIMGLSRSSMKPVWNGKEFVPRLILPMSLSFDHRVIDGADGARFITYINQLMSDIRRLVM

SEQ ID NO: 7335 - protein, 476 aa, Xenorhabdus sp.
MMSTEIKAQVVVLGAGPAGYSAAFRCADLGLDTVLVERYSTLGGVCLNVGCIPSKALLHVAKVIEEAKALAQHGIVFGEPQTDIDKIRLWKEKVISQLTGGLGGMAKGRKVNVVNGVGKFTGANTLVVEGENGATTINFDNAIIAAGSRPIQLPFIPHDDPRVWDSTDALELKTVPERMLVMGGGIIGLEMGTVYHALGSQIDVVEMFDQVIPAADKDVVKVFTKRISKKFNLMLETKVTAVEAKEDGIYVTMEGKKAPAEPQRYDAVLVAIGRVPNGKLIDAGQAGVAVDERGFINVDKQMRTNVPHIFAIGDIVGQPMLAHKGVHEGHVAAEVISGKKHYFDPKVIPSIAYTEPEVAWVGLTEKEAKEKGISYETATFPWAASGRAIASDCSDGMTKLIFDKESNRIIGGAIVGTNGGELLGEIGLAIEMGCDAEDIALTVHAHPTLYESIGMAAEMYEGSITDLPNPKAKKKK

SEQ ID NO: 7336 - protein, 881 aa, Xenorhabdus sp.
VQTAGHIKDNESEELVVLEEYRRHVAERAEQGIVPKPLDAAQAAALVELLKNPPQGEEDFLLDLLTNRVPPGVDEAAYVKAGFLAAISKSETTSPLITPEKAIELLGTMQGGYNIHALIDALDDEKLAPIAAKALSHTLLMFDSFYDVEEKAKAGNPHAKQIIQSWADAEWFLQRPALAEKITVTVFKVTGETNTDDLSPAPDAWSRPDIPLHALAMLKNAREGIVPDQAGVVGPIKQIEELNEKGHPLAYVGDVVGTGSSRKSATNSVLWFMGEDIPFVPNKRGGGVVLGGKIAPIFFNTMEDAGALPVEVDVSRLNMGDVIDIYPYKGEIRLHDTNEVLSTFELKTDVLIDEVRAGGRIPLIIGRGLTTKARESLGLPYSDVFRQAKTVEKSNRGFTLAQKMVGRACGTTGIRPGEYCEPKMTSVGSQDTTGPMTRDELKDLACLGFSADLVMQSFCHTAAYPKPVDVTTHHTLPDFIMNRGGVSLRPGDGIIHSWLNRMLLPDTVGTGGDSHTRFPIGISFPAGSGLVAFAAATGVMPLDMPESVLVRFKGKMQPGITLRDLVHAIPYYAIQQGLLTVEKKGKKNIFSGRILEIEGLPELKVEQAFELADASAERSAAGCTIKLDKSPIIEYLQSNIVLLKWMIAEGYGDRRTLERRIIGMENWLKDPQLLEADADAEYAAVIEIDLAEIKEPILCAPNDPDDARLLSDVANSKIDEVFIGSCMTNIGHFRAAGKLLDQHKGQLPTRLWVAPPTKMDAAQLTEEGYYSVFGKSGARIEIPGCSLCMGNQARVADGATVVSTSTRNFPNRLGAGANVYLASAELAAVASLLGRLPTPDEYLQFMEKVDETAADTYRYLNFDQLNEYTEKADDVIFQTAV

SEQ ID NO: 7337 - protein, 268 aa, Xenorhabdus sp.
MRLIPLTNASDVGRWSAHYIVRKINEFKPTAERPFVLGLPTGSTPLATYKELIALYQAGKVSFRNVVTFNMDEYVGILEDHPQSYHTFMYQNLFNHIDIKKENINLLNGNAADVDAECLRYENKIKAYGKIHLFMGGVGNDGHIAFNEPASSLSSRTRIKTLTLETRTANSRFFNNDVESVPQYALTIGVGTLMDAEEIIILVTGTQKAQALQAAIEGNVNHMWTVSCLQIHPKTIIACDEAATMELRVKTVKYFRQIEADILSEFAS

SEQ ID NO: 7338 - protein, 393 aa, Xenorhabdus sp.
MYALTNCIIYTGHDRLSEYAVIIEGGIIKHICPENELPAGIEQHDLQGANLSPGFIDLQVNGCGGVQYNDRMEDITEETLHIMQKTNQRYGCTSFLPTLITSPDELMIKAIEVMRIYLANNPNQAIGLHLEGPYINPVKKGTHNAAYIRKPTPEMVNYLCINADVIKKITLAPEMVENHYIHQLTEAGIIVSAGHSNATYEEARRGFQNGITFSTHLYNAMPAISGRQPGLISAIYDTTEVYAGIICDGMHVAWPNIRSAKRLKNEKLVLVTDAIVPAGLDENSNIEQFTFANKTIYYRNGLCVDENGTLSGSSATMIECVRNSVEKVGIALDETLRMATLYPAKAIGVDKHLGTIEPGKVANLTAFTHDFKICKTIVNGNIVNDNNNKGNEA

SEQ ID NO: 7339 - protein, 248 aa, Xenorhabdus sp.
IIFEHPLNEKMRSWLRIESSLQQLEKQSHLDSQANSLAFFRTIAELIEILERGEVRSELLKELERQQIKLRQWLNAPNVDTTMVHSLVEQLKERSLALHHAPRLSQQIKEDRIISMVRQRLSIPGGCCSFDLPTLYLWLHLPQSTRDETVSSWLNSLLPLKQALESILELIRQSTMFSSQVSHNGFFQGNAGDADLLRLKLDISENQLIYPQVSGHKTRFAIRFLPMDSENGTVPAHLSFELACCNFR

SEQ ID NO: 7340 - protein, 207 aa, Xenorhabdus sp.
MTYIVALTGGIGSGKTTISNVFSSLGVPLVDADVIAREVVAPGSPALKTIAEHFGSDILLSDGSLNRAVLRQKIFAAPEEKQWLNSLLHPLIHAETQRQLNQINAPYAIWVIPLLIENNLMHLADRILVVDVSPEVQISRTITRDGVSREQVENILAAQADRNERLEKADDVILNDQKEQDLTVRIAELHQQYLKQAESVRQEERNE

SEQ ID NO: 7341 - protein, 446 aa, Xenorhabdus sp.
EIDELCQKHQAIIIKRNSYSITIACSQSPNEEFITALRFISGAIIDFNIWPKAKIESMLTKKNILPSYTENYCSENGETETYRIENLTTPNNNYNEKQMIENNSENIDTPVIQLINQTLSISIQKRASDIHFEPLQNNYQIRIRVDGSLHFMPPPPPQMNTGIPARLKIMAKLNIAEKRQPQDGQFDWNDNKNRYAIRISTLPTLYGEKIVLRILSTIQQLSLEQLGLSESQLRLLVQKLHLPQGMIVVTGPTGSGKTLTLYSCLKYLNQTQKNICSVEDPIEIPLQGINQTQVNKKIGLDFAKVLRALLRQDPDIIMVGEIRDNETAEISMKSAQTGHLVLSTLHTNSTIDTLSRLQHLGISGYTTASCVKLIIAQRLVRKLCPHCRQPAEKPEFIHTGNNDTKQNITVKTWVAVGCEHCFSGYYGRTAIYEFLELNNHRLKSVG

SEQ ID NO: 7342 - protein, 140 aa, Xenorhabdus sp.
MNQQGFTLMEVMVVMAIVSILGAIGIPSYQGYIQKAALTDMLQSIVPYKSGIDICHFETGNYKECSSGHKSIPSGFNSRYINTITVKEGEANIIGQKNLSGLSITLKPDQDTKTGMTHWQVMCHSESESLKTKCQETFKF

SEQ ID NO: 7343 - protein, 555 aa, Xenorhabdus sp.
MSEADTRPTNFIRQIIDEDLATGKHTSVHTRFPPEPNGYLHIGHAKSICLNFGIAQDYQGQCNLRFDDTNPVKEDIEYVESIKQDVQWLGFQWSGDIRHSSDYFDQLHQYAIELINKGLAYVDELSPDEIREYRGTLKEPGKNSPYRDRSVEENLALFEKMRAGEFAEGKACLRAKIDMASPFMVMRDPVLYRIKFAEHHQSGNKWCIYPMYDFTHCISDALEGITHSICTLEFQDNRRLYDWVLDNITIDCHPRQYEFSRLNLEYAVMSKRKLNQLVTENIVDGWDDPRMPTISGLRRRGYSAASIREFCRRIGVTKQDNNVEMAALESCIRDDLNEHAPRAMAVLDPVKLVIENMPEGEVILTMPNHPNKPEMGSREVPFSRELYIDRADFREEANRQYKRLVMGKEVRLRNAYVVKAERVEKDAEGNITTIYCHYDEQTLNKDPADGRKVKGVIHWVSAVHAAPAEFYLYDRLFSVPNPGAEEDFLSTLNTESLVVRKGFVEPGLVNAMLEKTYQFEREGYFCADSKLSTAEHLVFNRTVGLRDTWAKISKE

SEQ ID NO: 7344 - protein, 404 aa, Xenorhabdus sp.
WPDFAEKTLKDIQQPLLSGEVNYWTGKKGMEFENKFADWIGAEMAISCNSGTSAVNIAVGALNIGPGDEVIVPSYTFIATSFAVLQCGAIPVFCDTTEEHTIDPDKIEALITERTKAIIVVHLYGVVCDMDAILAVARRHNLKVIEDSAQCLGGKYKGKSVGTIGDVGTFSFCQSKHFTTGGEGGMVVTNNPEIGWECRAYRDHGFDVKRKFDLLALEEVSWHVHNRIGYNYRMTEIQSIIGINELERFDDWNMHNRKQYAKIYDAKFAEIDLIHSLPLNNEDRQNAYWLYPIVFELAKLDCTAEIILRDLKKIGVPAFKIQWPEAYGERVFRELRGFGSANFPFHSSEYTSPESVNYCDVVCETARSLLPRTISLYLHPSWNEEHIVYCADQLIAVLENHRIR

SEQ ID NO: 7345 - protein, 237 aa, Xenorhabdus sp.
MDKSNQSDFYNMEIRSRSGIDEMGRIPFYHHQALWDNRQNQIIYSVYEKIFGTSDYVVSVHRVDMNLAVNENWKYEGFIHWDIDVSIRPLERKIQGLLSLTDDNGNSGGFQCVPGFHKVIYEWLSKQPAGYNSRFPDTAGMNIKSIPLKAGDYVIFDSALPHGNIPNTSNEPRLAQYFCLFPRTDITEQQVAERIVAYKKGLPTTSITGKAFPVKKAHQQDTSQIHLTDLGKLLLGF

SEQ ID NO: 7346 - protein, 333 aa, Xenorhabdus sp.
LALSVLLLAGFVTIFDLFVVNIAITNIQTHLQASIFQVTLVIVTYEIGFGLLLITGGRLGDLFGRRRLFQFGILTFTFTSLLCGLAPTANTLIIARFLQGLAAALLFPQVYSCIRVNFEGDNARKAFGLLGMTLGFAAIAGQILGGWMISANIWDLQWRSIFLVNIPVGMLALIFSGYIPESKAKEKTGLDWGGVALSGIGIFALLSPLLVGPVLGWPAWCWLLLLFSLVMLSQFVRHERRYVYQGKTPLLNFELLKNRQFSLGCLLVLCIYSTSSSFFLIFALFLQSGLGLAAIDAGLIFAPASIGFVLSSLTAPYWVKRFGNRAIVAGALL

SEQ ID NO: 7347 - protein, 260 aa, Xenorhabdus sp.
LWASTYVITTEMLPPNTPLLAATLRALPAGILLLLICRTFPKGIWWFRLAILGLLNIGAFFYFLFMAAWYLPGGTAALIMSSQPIFVILLSTFLLKTPLTKMHIASEILGIIGIALLVTNANTRLNWQGIIAGFAGCGCMALGVVLTKYWNRPTNLSLLSFTGWQLMLGGMMLLPVAILTEGIPHQITLTNIFGYSYLCLIGAVFSYIIWFRGIEKLPVVTISFLGFMSALSACILGFVFLKQTFSFFQFIGACIIIIAV

SEQ ID NO: 7348 - protein, 329 aa, Xenorhabdus sp.
VEDLLNPSTEARDNHAYMLRRRLSELHEKFKTQFPVYLFITKTDLLKGFTAYFTHLDKASREQIWGLTFPQNNKVEWNINAAFDEQYRQLQRRLDAELPYILLNESNPQQSAESYLFPQEFAALHPYIAQYLEIIFARSGFEAPSYPRGLYFTSGKQEGIPFDSVMEKFNQNVQLPTDNNSISMSWGNGEDNKGMHYPSQAQQPYFLKNLLEGIFQEAGLASYNRWRIYKNRLVNWLGYMTLIAILIAVTTLFLTSYHNNENYLAEIQAKMPAITKLGDELKQNTNNANETNNIYNLLPMLNTLANLAQSQPFFAGRPPDILSHGLVHG

SEQ ID NO: 7349 - protein, 665 aa, Xenorhabdus sp.
MGLYTGELVNDAGHDLYTKALQSLLLPHVARLITDQLKQVSNNDIDKTYSALKAYQMLYQPDHYDGKFLRNWVMQYLEAQLAPDTPEIQFKQLDWHLGQLLDNQPVTSPYVFDSSLVESRQAFISSTPLAVRTYARLQSALLNNPDLEPVNLVTLAGPQADLAFSHISNEPITSGVPGLFTPAGYQKIIKDMEPLIAGSYIQDSWVLGSYAKKQPVKLVEQSVRQIYVNDYIYQWDKFLGDIRLNHIDDLTQRANTARLLSSSVSPLRLLLINISKNLTLNDPLNSLMNKGKNIAKLGSLSSKTSNLANKANRLSNLAPQQMILQNNGQPSPENMLEAHFAQITDLAKNPDGKNPQIPFDDILKKIGDLYQYLTSVQNAVNTGSTFPPNNIITQLQTASERLPMPFRDMITSLAIGASSDAQISDMRSVGKQLSSEIGGFCNQAITNRYPLVATAHVDIKPDDMARMFAPEKGMMDSFYKKNLEGKVDTSQPQWRFMPGVDGKPLPGGARLLRPFQQAKIISDTFFGNGTPTPSFTVMVQPISMGNQILSMVLNVGGQQLQYSHGPQVPQLINWPGSTGVNQASIQLNLADGTTATLSASGPWALNRLLDKAKQVSHSSSAHHDDSALQATFNIQGHTVVLGFTPNSIFSPFKLPAFSCPNMKSI

SEQ ID NO: 7350 - protein, 372 aa, Xenorhabdus sp.
MSHENSTNIDALLAPISSKFPCGENLEYDDDFLLLEQSLVGKTEQQFGDFLIPAEPPNWLEVEKQATNLLLSRTKDLRIIIALMHAWVEARGLSGYADGLALLKQMLERYWDEVWPKLEFDGEYDPLFRLNTLADIEDGSPLTLKVQNSILLKNVLQELSFRDVYSLLDGSITEISGYTGGRTRLLKELKQESSSPEISILVVIRDHVTALTELIHRHLSASHSPEFSLLLKHLNTVIEFSLLKPPASAEAPMTDSDKAASESEPVSKPASTSVKNTVIPEPSADLSSFDWYEVEAHNREEVRMLLEKVKLYFITHEPSHPAPMMIDRIQQLIDRNFIDIISNLAPEGLHQLAIIFGYADNSGTDTDQDDTH

SEQ ID NO: 7351 - protein, 144 aa, Xenorhabdus sp.
MADLAGKSTEAQPEITDRKFLEIDVDNFDERMKSIKPRAAFQVDNTLTGDGKLNVELVFERMEDFQPDAIAKKVEPLANLLEARTQLANLLSYMDGKTGAEQLIAEILQNPALLKSLAEAPKPEDSISSEDNTPGSDESAENKE

SEQ ID NO: 7352 - protein, 500 aa, Xenorhabdus sp.
MSTTEQETLSQQEQTLKEYTADELSVLLGKEFRPQSDQTRSAVENAVKTLAQQALENTVTLSGDTYRTIQSLIAEIDTKISQQMNHILHHDEFQTLEGAWRGLHYLINNTETDEMLKIRVMCLSKKELRNTLKRFKGISWDQSPLFKKIYEAEYGQFGGEPFGCLVGDYYFDHTAPDVELLRQIAQISASAHCPFITGAAPSVMQMSSWQELANPRDLTKIFQNTEYAPWRSLRESEDVRYIGLALPRFLSRLPYGALTNPVDNFNFEENTDGPTHENYTWANAAYAMAVNINRSFKLYGWCTSIRGVESGGIVENLPCYTFPSDDGGVDMKCPTEIAISDRREAELAKNGFIPLLHRKNTDMAAFIGAQSLQKPSEYYDSDATANANLSARLPYLFACCRFAHYLKCIVRDKIGTFQERSDMERWLNEWITNYVDGDPVNSTPFTKAKKPLAAAEVQVEEIESNPGYYQAKFFLRPHYQLEGLTVSLRLVSKLPSLKGA

SEQ ID NO: 7353 - protein, 126 aa, Xenorhabdus sp.
VINNINKSNQGTGLGGGIVEVSNLHLNLLFDKSAITLRKYVVSGKHIKEVKLHVRRQGGSQESWYELTLTQAMVADARLVYGDSNFYCDVQLAFQKHKESYFPQDFQGKKGAEVTYTWDSYTNKLE

SEQ ID NO: 7354 - protein, 529 aa, Xenorhabdus sp.
VAPNRQVEIRDGDVLNIGSYQIQVIDPYQNARLQTDISATSGSSESDTQGIPSEVWDGLEKIFTIPDTPTSSDKHQASSDGNDHNPLFPSSQQENDERNPIDPLAKIKTTADLDTLQLRAKDPVTMFNTDPLFRQEDILNDNTPTTLFQNDKEYDLEHNDKEGEVDPLALFSDHNVKQKQNTKNEDPLDLMLGTAAPLTSPDHPKIAEPKSVSVTQSASDHNTQSEAQLSSLPPLFTTEELSREINQDLVTNQFGTETEETMGEDIFFNTPNKQTDQSHQPYINQQIKQLNTPSHISDDDPIYERLNIDPISYKSDEHMTEGVKLEGKLLAALLEGMGLKNLRQPQFDEHRMYQLGQLISQLSQGLVALNTSRTLLKREAEAGITQMLSDTNNPFKLLPSGQSVLVQMFGDHMPGFMSIEQATRDILVELQAHQLGMIAGMRAITVDILQLFHPTILEQKARDEGGMPRLSLSSTYKASLWEFLTKHYQKTASEFEHNSGLFGKNFLLAYENEVNNYKNSQKKIKKQTG

SEQ ID NO: 7355 - protein, 184 aa, Xenorhabdus sp.
MNDNTTLIHSGYHRPGNTRHITARDKMRPSLLDRLTDNEPDKKKEAASNHLISHNILRQNLLRDLQWLLNSINGESEQNLSPFPEIRRSVYNFGLEPLAGKLMSEIEWEDIQHKITKAIHIFEPRIIPDGLEVNCVSDTHSLTLYNRLSIEIRGFLWCVPWPLEFLFHSDIDLENGYFTIKEAG

SEQ ID NO: 7356 - protein, 606 aa, Xenorhabdus sp.
MGKEFAERYPKVANRLGMHGIDVTDPYVERLMEGFAFLTSRIQLKMDAEFPNFSQQLLEMLCPNYLAPTPSMSIAELQPDTSKGDISHGFLVPRGTIMHCQSLKKDGITLQYSTAQDVILQPLHLQKVELGKIPANIPLASLNLHQCGAVSALRIHLTCQGKFFLSELELNKLVFFLSGPDIQAQQLQELLMEHCVGMICQTLGDTPQYQVLPDISPHHEGFDDEQSLLPNDPRTFSGYRQLHEYFAFPARFQFFSISGMQSLLEETKKESEFELILLLDKIDEDLEHLVDVSYLALNSTPVINLFPKLTERVTLKESTNEYHLVVDNTRPLDYEIFSVQRLHGADIKRRETQIFRPFWSTFSDDKGNYGAYFSLRRDPRILSEHSLHYGTRTSYLGTEAFVSIVDEQHSPWPNELKFLTADVMCTNRDLSAMLRQQDIDSFVMLDSIPINQIVFLKRPTIPHPALAQGSASWKLISQLQLNYLNFMDKDDEQGTQALRQLLSLYANLSEPATARQINGIRHCSLKTIHRRVPEPGPIVFARGVGIELEVDEQEFAGTSPWLLGSVLERLFSHLVTMNSFTEMTLYSQQRGKIGYWPARMGKKQLL

SEQ ID NO: 7357 - protein, 343 aa, Xenorhabdus sp.
MSETGAVAIHSISRLPDNFWQELTQTPWQFDLFQTLRRIDAQSGEYYMLGSSPLPRYDLLRLGQKASMIFAPCTISEAKQRKNSKQYDVLIYSFGLFGPNGPLPTHITEYTYARQYNYQDPTLTAFANLFHNRLIQLFYRAWANAQSTVSLDRQDNQRFCHYLACLVGMGLPAQKNADSINEHARYLLSGHLSRQGHSAEGLEKILFTYFNIPLKIKQNIPQWLDVEIQDQARLKAGRNMPRLGQSAFLGTALYDVQYKFRIKLGPLTISEYEDFLPNQPKSQQLRDWVRQYLGIEYAWDIQLALHRTDIQGIHLSDPVKLGLSSWLGKMEQKIHRDDLIYNP

SEQ ID NO: 7358 - protein, 885 aa, Xenorhabdus sp.
MSEISRSVLFGKLNPILFTSLEGATAFCKLRGNPYVELVHWLHQIMQQQNSDLQKLIHHLGLDESALTKDIVAALDSLPRGASAISDLSEHIDNAVERAWVYGSLKFGVAQIRSSHLLIGILKTFNLRNALKAISPLFDHINADTLIDNFNNIFDGSDEAQESIISSTETQGASPQSVTGSALQQYGQELTARARNGEIDPVSGRDEEIRQIIDIVMRRRQNNPLLTGEAGVGKTAVIEGLALRIVAGEVPPPLKNVQLWLLDIGMLQAGAGIKGEFESRLRKVIEEVQSSPTPIILFIDEIHTLIGAGGQQGTGDAANLLKPALARGQLRTLGATTWSEYKKYIEKDPALTRRFQVVQVHEPDETKALIMLRSLVNTLEKHHRILLLDEAVDAAVHLSHRYIPARQLPDKAIALLDTACARVAVSQHAEPPQLENCRHKIDSLNVELGIVERESKVGMGDPLRAENILSQLATLTEQQEQLEARWQQELLLTDKIIQLRLQLHEEQADEEQNNNDKITLHTELAELQQQLEMLQGEEPLIFAAVDSNVVSAVVSDWTGIPLSRMMKDEIEAVLQLADTLNQRVIGQYHALETIANRVRTSRAKLDDPNKPVGVFMLCGPSGVGKTETALALAETLYGGEQNLITINMSEFQEAHTVSTLKGAPPGYVGYGEGGVLTEAVRRRPYSVVLLDEIEKAHPDVHEIFFQVFDKGWMEDGEGRHIDFRNTIIILTSNVGADLVNSMCYQHYQQSNTLPEPEQLSSALRKPLLNTFPAALLGRLLVIPYYPLDDEVMTSIVYLQLGRIQKRLLENHGITATFDEAMIENIVSRCTEVESGGRTVDAILTNTLLPQISQRLLSACAHGEQFNQLQVSLEQGELNFQFSNDI

SEQ ID NO: 7359 - protein, 245 aa, Xenorhabdus sp.
MRLCQRGRAGFSLTDEGREILRASETMMASIEEFRQHVNQIHKQLRGEFNIGIINNLVTQPMMRITNALERLRSASDGILINISMSTPTEIERGILDGRLQVGALPFITPLSGLNYLPLYNERSYLYCSNTHEAFLLADNFDTEHLNQLDAVIPGYRISTEAMNHHKLLNSAATASDREGIAFLILTGKFVGFLPDHYARIWVEKGFMKALLPEKIYYDSKISIVTRKGKRTNAILGLFLEELGY

SEQ ID NO: 7360 - protein, 198 aa, Xenorhabdus sp.
VYANPLHDAVNQNDIETVKSLLNDDQTLLDERDGQQRTPLMLATQHNYAAIAIFLIQSGADVNAKDRQLDTPYLLAGAQGYNKILIATLHHGANLKDTNRYGGTALIPAAEKGHPETVQILLDAGVNPNHINKLGWTALMEAVVLGNGSSVYVDIIDRLIKGGANVNIPDKNGVTALTHARQRGYKDIIKLLESANAK

SEQ ID NO: 7361 - protein, 109 aa, Xenorhabdus sp.
VVSKTLEHHRGGMKNEACHGMPMPDMQNSHHQSDSMNHHGVDHVHMGLMDDIACGYCQLLINLPLLSGSFIPFILLTLTISRAPPAPRFSGPAIRLFYGESQPRAPPLN

SEQ ID NO: 7362 - protein, 678 aa, Xenorhabdus sp.
MAATKERAEETKNLNSVRGNVAYESESVITVTAPAVSPLNIFSSLKTPRQPVPASDGSDYLKTIPGFSQVRSGGTNGDPVFRGMFGSRLRMLIDDGEVMGSCPSRMDAPSSYISPESYDVLSLVKGPQTVLWGPGNSAGTIRFERSRPQFSEPDAKGNISTVAGSNGRWDGNADLSFGNQYGYMRLIGNKSRSNDYKDGDGYRIPSHWNKWNTDVALGWTPDDNTLLELNAGQGDGKARYAGRAMDGSKFKRESLGMRFEKSNIGDVFDKFETNFYYNATTHVMDNLSRPSLAAMKMGSGDSHMGHGNGHMKSSHMNHGSHGGHGSHGGHGNGMKMSHQVDRKTLGGRMMGTWLWEDFTLQSGVDMQTNTHRNQSQKDARFRDYGVFGELTWDADEQSKVISGARLDRVLVDRYPQKIEEKQEERTDTLPAGFVRYEHNLKEAPVMFYAGLGYTERFPDFWELFWSKGRVFNQLKTEKTTQLDIGAHYNDHHLQGWISAYAGKIDDFILFHYAGQKADNVSNIDATILGGEMGIGYHLNENWKTNASLAYSWARNNSNHRPLPQTPPLEARFGLSWEYGNWSSNGLLRLVSKQNQIAMNEGSVAGRDFDRSAGFAVLSANAAYKVTKNMQVSAGVDNIFNKTYSEHLNRAGNDGFGYSANTPVNEPGRTYWARFNVKF

SEQ ID NO: 7363 - protein, 198 aa, Xenorhabdus sp.
MKLTLISGSQRQDSNSQRIARYLQKLSSEYGFTDTTFLELCNVELPLHDGYTTDISAESHPWQAIAHHLRDSDAFIFVSPEWHGMVPPALKNLLLYCSVTELGHKPALLTSVSSGPNGVYPISELRMTGFKNNHVCFLPDHLIFRQAGNLISPELVCSDTAFENRVHYTLKLLKSYAEALKHVRDAIGDEMQQYPYRM

SEQ ID NO: 7364 - protein, 455 aa, Xenorhabdus sp.
MAKLFSLDQGTAAGIAAGALTQSAIIGTAGAAIAKLDLAPAQIQQLQGNVAVGYAVTYIFGSLGTIIICVNILPKIMRRSIREDAMKAELDLLKGAPLLAADQTPALPGIVGRLYEAGPAKNIHVSELEALASPQFPVTLERLKRGGEEIHVTPDLLLMENDVLLLVGRRQGIIGLAKHLGKEVLTEHGPSMVMTTNEALVVNPAFINKRLAELRTQVASDVRHGIYVISIKRGENMLTLSDDTVIKHSDVITLYGSEQDIQRAISLVGASLVKSIKTDLLFHCLGIAVGLLIGLLIVRIGSVPLTLESGGGALLSGLLFGWYQSRKPLSGNIPSGASSILRDLGLAGFVAVVGLQSGLQAVETIRSSGISIFLIGVVVTVVPLMITLFIGRYLLRYDNAAIFAGALSGTRSANPAFGEVLNKAGNAIPTAPFAVTYGLANVFLTLLGPLIVAIA

SEQ ID NO: 7365 - protein, 550 aa, Xenorhabdus sp.
MSKQQDKYAALSPFELKDALIQLASSKSGRTMLNAGRGNPNFLATLPRRAFWRLGLFATSEAELSYSYLPHDIGGLPRIEGIEARFDEFLSANHDQPGISFLARAVSYVRDQLGLSASQFLHEMVEGILGANYPEPPRMQRISEQITREYIVKEMVGGLVSAHDVELFAVEGGTAAMTYLFNSLRNNGLVKVGDKVAIGSPIFTPYIEIPQLEDFQLKTVMVQASPKNRWQYPDSELEKLLDPSVKIFFCVNPSNPASVKIDKHGLEKLADIIRQRPDLIILTDDVYGTFANDFKSLFATCPRNTILVYSFSKYFGATGWRLGVIALHRNNILEQKLAALPASEKKRLNKRYESLTPDVSALRFLDRVVADSRSVALNHTAGLSTPQQIQMVLFALFSLMDSDNGYKSSVTKIIRRRQAVLYRELGIVQPDDEESVDYYTLLDLEEISRRIYGNAFATWVKGTVDSTQFLFKIAEDTGIVMLPGSGFGTLKPAGRISLANLNEYEYATIGKVLKKLLEEYFVVFTKEGKHKSNISSSKVNKKDHSKIDSY

SEQ ID NO: 7366 - protein, 104 aa, Xenorhabdus sp.
MREPITTSQTRSFISPLIKRLMGDLSPHLTYVLNLYWDVLEFNQQADEYFHFSQIKDEQRNLLWLLFTNNHDRELLPNWQQDDYKMLASFRRDYAIASKDSYVQ

SEQ ID NO: 7367 - protein, 524 aa, Xenorhabdus sp.
MRLEVTCQDRIGLTRELLDLLVLRNIDLKGIEISPARRIYLNFTQIDFNTFRLLMAEIRRINGVMDVRTVAFMPSEKEHRAMRTLLESVPDPILSVDMKGNIDLANLASQSLFGISKEKISQKNISQLISNYNFLRWLESDHPEPHSVTLTIKEKTYLMDVIPMPLTDENQEIKCVGAVIMLRVFTQAEPAQKKRIVNDDQAFENIVAVSPKMVHVVEQARKMAMLDVPLLLIGDTGTGKDEFAKACHLRSSRGKQPFLGLNCASMPDDVVESELFGYAAGAYPNATESKKGFFEQANGGTVLLDEIGEMSPQMQIKLLRFLNDGTFRRVGEDNEVKVDVRIICATQKNLVELVRKGEFREDLYYRLNVLTITLPPLRERQADIMPLTDYFVTRFAEEQGVEKPKFAPDLEQFLCSYYWPGNVRQLRNAIYRALTQLEDNQLSSQDIQLPHLEAETSFISEDILVGSLDEISKRFERSVLTRLYRHYPSTRKLAKRLGVSHTAIANKLREYGLSGKKHAESGDE

SEQ ID NO: 7368 - protein, 80 aa, Xenorhabdus sp.
MDWLSQDIAARLSARAAQGIGAGLLTARLGIKSMELCRPLPWIDGDKPKLGDFRYQLISQLKSTLATKPKTRNEAKKSGS

SEQ ID NO: 7369 - protein, 453 aa, Xenorhabdus sp.
MSDSNTVQTRSFHVNPSHDLNLKAHWMPFSANRHFQQDPRMIVSADGHWLTDDKGRRIYDSLSGLWTCGAGHSRSEIRQAVSEQLGTLDYSPGFQHAHPLSFRLADKIASLMPGDLNHVFFTNSGSESVDTAVKIARAYWRIKGQPTKTRMIGRMRAYHGVNIGGTSLGGIGGNRKMFGQLMEVDHLSHTLQSNMAFTKGVPATGGIELADELLKLIELHDASNIAAVIVEPVAGSAGAIVPPQGYLQRLREICTQHNILLIFDEVITGLGRLGRWTGAEYFGVTPDILTFAKQVTNGAIPLGGAVVSSEIYDTFMSQPLPEHMIEFSHGYTYSAHPVACAAGLATLTLLEKENLIQQSAELAPHFEKILHELRHCPNVVDIRNCGLIGTIQIAPRNGDGVIRPFEAGLALWKAGFYVRFGGDGLQFGPMFNAKPEDLDRMFNAVGDVLHQVK

SEQ ID NO: 7370 - protein, 163 aa, Xenorhabdus sp.
MKYDHVDRLLIQWEQQRPDLDPSPMGVIGRLCRANKIIEQRLQATFKTFDLSAIEFDILATLRRHNSPITPTEMYQSVMLTSGAMSTRIEHMVQRGLVERAANDKDRRSCKVSLTSEGRALIDKAVESHLENSREILSALSNEQQEQLAMLLRHWLLANESDI

SEQ ID NO: 7371 - protein, 89 aa, Xenorhabdus sp.
VMTPLLNIVLAFVHTKFAGMASGIVSTLQQVGAAFGVAIVSILVQWKLDITGVSAFMGYQNALVSGMFYNIAAAFVAFCLLRALNRTIP

SEQ ID NO: 7372 - protein, 160 aa, Xenorhabdus sp.
MVWIDYTIIAIIGFSALVSLIRGFVREALSLITWGCAFFVASHFYTYLAVYFTRLGDELVRNGVAIAILFIATLIVGAVVNYVIGSLVQRTGLSGTDRVLGICFGALRGVLIVSAILFIADSFTPLPQSADWKQSQLIPQFSQIIRWFFDYLQNASSFLP

SEQ ID NO: 7373 - protein, 55 aa, Xenorhabdus sp.
MFVTAVEIGSTGLTGAEYSTAGVVTWLTDGDDLGEDGIDDNDIAEVTCPDWNRLC

SEQ ID NO: 7374 - protein, 32 aa, Xenorhabdus sp.
MQFWNGFSVIGHFEGFGKGTTDGESAGKGYWE

SEQ ID NO: 7375 - protein, 205 aa, Xenorhabdus sp.
MIDLYYAPTPNGHKIALFLEEVGLPYTIYPIDISANEQFTPEFLAISPNNKIPAIVDHQPADRGEPLSLFESGAILLYLAEKTGKLLSQNERERIRQLQWLFWQVGGFGPMLGQNHHFNRYAPEVVPYAINRYVTETQRLYKVLNTQLEKTPYLGGNEYSIADIATYPWAYCYEYQKINLQDYPAVEKWLEKISQRPATQAIYNK

SEQ ID NO: 7376 - protein, 304 aa, Xenorhabdus sp.
MHILVTGGTGLIGRRLVYQLLSLSHSITVLSRSPQKVYSLFSDQVECWTTLNDRNTLDGFDAVINLAGEPIVDKRWTPKQKDKLCQSRWELTEKLSALIRAGESPPSVFISGSAVGYYGDQGQSVVSEDEPPHDEFSHQLCERWEKLALQAKSEKTRVCLLRTGIVLASQGGALSKMLPMFRLGLGGAIGDGRQYMPWIHIDDMVNGIYYLLVSPELEGPFNMTAPYPVHNDQFSAILAKVLHRPALFRIPAFVLKIVMGEAAALVLGGQQAIPKRLEEAGFGFRYFELEEALKHLLTENVRQY

SEQ ID NO: 7377 - protein, 228 aa, Xenorhabdus sp.
MVLNQSLIYYAAHTVSATLIGILTSLIPLLTIILSIFVLRITPTVGIILGSAFSLFGLIWLVGKGEPSTLLKNGLGIGDVMMFIASAAYALYGVLTKRWAIPLPNWQALYIQIGFGVLLLSPNFMMTEDVRLTGDNIPLVLFAGIPASIIAPYVWIQGVSRLGANMTSIFMNLAPVFTAIIAIVVLHEKMHSYHLIGGGIVLAGVMIAQQLRTPINSYKKQTEKSIKS

SEQ ID NO: 7378 - protein, 43 aa, Xenorhabdus sp.
  unsure (1)..(43): unsure at all Xaa locations
MPGGVGAVAYNAIVAQRPAEPGTIVAFSGGSLLNLAXGKFGRY

SEQ ID NO: 7379 - protein, 319 aa, Xenorhabdus sp.
MESVSRLQDLGTELRIVKSGTSISLLSTDEPITDPVTVLGSLPAITAGSLGNAGFMADYGVDYAYYAGAMANGIHSEEMVIALGRQRILGIFGSGGLHIPRITAAIARIRQALPEGPFGVNLLHNPGNPDWEMACVRLCIENQVRVIEASAYINLSPALVYYRVSGLSQQPDGSVLRRHRLIAKVSRREVAQHFLRPAPENLLQKLWADGLITAEQVELARQVSMADDITVEGDSGGHTDQGVLACIFRSVVQLQDEIAADESQIGYQVRIGAAGGLGTPHAILAAFALGAAYVVTGSINQSCVEAGTSSAVKKMLGQA

SEQ ID NO: 7380 - protein, 968 aa, Xenorhabdus sp.
MEKRPDILAIRGISQPPLGSYIETFDVDCRKFKLPPNVIGAHLSCHLFLLPIAERAFLDAGYQLDGSKRNIAVIVAGGIDYSCLRYQIRNEISWQLEQSLVSHGIQLSAEDISALQEIVKDSLFPKPYPEGITGGIGNIVASRLAAHLKLNGPAFTLYNEESSPFKALELAQFMLSRQHVDAVMIASSSFGGSLENVLWDHQSDHGNQIVGDGGGVIVLKREQDAIKEKTPAYAMLDGIGISYVPDHSLDFRINEDAIVAAAQSSLTAAGCSVDQVGYIELYAGGRSGEIATELSALGRVYGTPDGKPTAAIGTLKANYGHLSASAGLLAIIKSALQLTQCYLPILPDYPQRQTLAQHAAGKFHLPVQTQEWPASEGASRCAAISHLGIDRSYSHVILSEPQNGKRARLTPPPVSNQPGLKVTTYTAREKTVEEFILNEQTLARFAPLRAISAQQQAVSAKETETTQKALPPAEVNHFIRNARTQLCYLQLEQTFYQLIKQNLAQSTEIESVNQASPMAEKTAVAAPVIFDEHQLLELTDGSVAKILGADYAEVDNYPIRTRMPSPPFMFVSRITGLSAVKDKLEPCYIEWEYDIPENAWYAVNGRVPSFVALESSHAMIVAFTVIGCDMLFKGQLCYRAVDCSTTIYSEMPKAGEVLRGRVNITSVIRVGSRFLAGYEYLCYVGDRLVFRLVATSGFFSRKEIEKAGAFDSKAYFAKARAAVTENPFTLLLSDKPSPKKATPDRQGQKTPSYAEFLPSAFLHCDKTTFNTQDITDVMNGDLSACFGSRYGRTHSENLCTPDTRMLSRILSVDKMGGEFGLGQIVGEFDIDPEHWAFRAHFKNDPVMPGTLLVEGSEQLMKFYLFYLGLHSLPDLEAQTLTEHTTSAKFRGEVKCTRDVLQFRLTCKSIDARYTADKQQGDKLDSITLFFIAETLYRGNVVGISDNMGVKYIRRQPQQTAEPEQEAVK

SEQ ID NO: 7381 - protein, 489 aa, Xenorhabdus sp.
MEHIAIIGVGCLFPGADSPEKYWDNLLHEKDCSTPLSAQELGVDPACYYSSEAAKPDTINYINNGHVRDFHFDGKGYHLPEEELNTLDDLFKWTIYAADQALNDSGYRQHKNILQKTGLILGSIGMPTHSTKQLMNPFYHKILQPYIRELIGQPDFKFNQFWPQANHSEQNLITGGYNATIAALALGLAGPRYCLDAACASALYAIRLGADYLLSHKADMMLVGSICHVDHIYIDHGFNILQVFPEKGDSIPFDKSSKGVKAGEGVGVVAIKRYSDAVRDNDKIYGVIEAIGLSNDAGTKHLLVPDQQGQNIALERAYQNCLREIDYIECHATGTNIGDQIELSTIEAFFGGSKNADESENIPLIGANKAINGHMLTASGMGSLLKVLLAMQHNLIPATPRVNQLVSTPQGKLNISHIVRQARPWPERHRPKRAGINAFGFGGVNGHMVISEDSPERRSACIPSQMQKMQKTERLANCWYRCSSGKNGR

SEQ ID NO: 7382 - protein, 2016 aa, Xenorhabdus sp.
MRYALDMGLLYSEREGCMSRTYFLHDRKINGDIAIVGMATHFPDAPNLYQFWENIIGKKDSLIDITEMSKEEYWKKEDFYHPDPTATDKTYGHRAGFVPAIDFDPVEFKIPPAILDSLSTAQLFALYVAKQAMQDAGLLDQQNSKTDRDRIGVILGGGGNGNTSFSLAARQQAPYLREIMTKAGLSEEVADEIIERAHGMYLEWNEDSFPGFLGNVACGRIASYFDLGGTSYMVDAACASSLAAIKAAIGELHSGSCDAVLTGGVNLENSIFSFLCFSKTPALSRNNVSRPFDQSADGMMLGDGVGMLVLKRLEDAELDGDKIYAVIKSVEASSDGRAKSIFAPRLEGQVKALKRAYASAGIMPADIQLVEAHGTGTASGDDTELKSLHAVFGESQLPPKSVAIGSIKSQIGHTRCAAGAASMIKVALALHHKVLPPTINVEKPTDLLMSETSPFYVNSESRPWLRSVRNAPRRAALSAFGFGGTNFHAILEEYEKQANGRYRLNESPWVVLLKGENPAELLTQCEATLSLFTRDSAENAIRRHLDQQDIDNFQRLQARILFVSQSIEQSVDLLSTAIRQLQKNSTEGWEHPHGIYYQPEGKMLDGRIVALFPGQGSQYVNMARDIANDYPEMRQALEVLDDIAVSESGHELSPIIYPVPAFSDEEYAGQQQRLTDTANAQPALGAVSAGYFNILGNMGFRPDFVAGHSYGEVTALWAAGVLSDKDFHRVSLARGRAAASASQLCGTGSDAGAMLAASLPHDRRGEILHRYTDVIIANDNSEQQVVFGGDTAQINQLHNELKTQGIHCRILPVSAAFHTRFIQPAYQPYREYLADINFQSPECQLFSSATAEPYSRSPQLIKELLAEQLIKPVQFRQTIEAIYQQGGRLFVEFGPKGVLGKLVSDILKNREHTVISTNPTDKGEERLQLARVQARLLAEGVKLRDINRYVRIQPVEEEKNRRLTFRLSGGFFLSEKNKARRQHALRVGDHAVVERFIAGSLPVQAEIESPPVYEVESRVEVIAESDLKSEIETEKMVEHNQPVSAEFIRQNVLTIIQKRDNPMEQNNKISESLNADTLNELLQAQQVMSQLHQQFQTNQKEYIQLLSMLLEKQYSLMETCRDHQNLPVMLSSLSQSVQLLDKNLELYHTNHERYFMTQQSLFQSGQVTSAMSLSSMPSSPKSSPSVSHVTTPAVEYSAPVKPVEPISTAVTNIHSAEKMEEIVAVRPVVPEMPETEEMPVAPMISMAASEPANEPVKPEPEPVEIKVKTQKLTPEIEKLVKRLDQITEENIISQLVNIVSERTGYPQDMISPEMDLEADLGIDSIKRLEIFGAMFDAFSANLELYGETSRNKDLENFEVDSLSTIARMSNFFREMVDEAINALYSRGNGSGSAQSPSLTENHPAEKQQKEMKEMVTDRGEKSDKLRSLGFVTSTTSSASANVKKQLAESQRIETSAVQPVLNHHTVLNKEAPKKETEKDPFAASPVSRFAVVKQALPMPEHLQDVFSSPKCWLIVDEETAGSTCANSCANSCANSIAESLKTQGQRVVIMSLRRDQASMSDESLLDAALTDIEQQHGPIEGVIYLQAVKQQVKGLIDVFSEQDYRSVETTFLLAKRLQGSLTGDGKRSGYFMVIMRGDGELLTSGREYLPVVSAGITGLTKSLNIEWANVFCRTVDIDTRIKDSDVAKIVMEELQDSRTEMGEIGRGVNNERMTLALREEKVLSVTPGMQVSPRDVLVVTGGARGITAHCITELAKQSQAAFILLGRTDITAPLPVWSAGKTTLSERKAAAIDYLQEQGIQPTPVKVNNMLSRLIHIDEINATLQAIRQAGARAIYLHCDITVPEQVKTALEKAQQQFGQITGLIHGAGNLADKRIEKKTLADLHSVFHAKVRGLENVCRAIDCTSLRHIILFSSVAGFFGNAGQTDYSLANEILNKFAYLPFRNKNKQIIRSVNWGPWDGGMVSDVLKRAYKAQNMVIIPLEEGVQRFVREFCDSRSRQITIGGRMYMAPKKMTP

SEQ ID NO: 7383 - protein, 172 aa, Xenorhabdus sp.
MTQEKSVDIEWVDIVNEENEVIAQATREQMRNQNLRHRATYIVVHDGMGKILVQHRTETKDFYPSKLDATAGGVVTMGEHLLESARREAEEELGIAGIPFAEHGIFYYEEEICRIWGGLFSCVSRGPFALQEEEVSAVYWLSPEEITARCDEFTPDSLKALSLWLSRNKDLS

SEQ ID NO: 7384 - protein, 194 aa, Xenorhabdus sp.
MKKLIVGLTGASGAIYGIRLLQVLQPVEDIETHLIISKSARQTLALETDYTLREVQSLADVVHDNRDIAASISSGSFKTSGMVILPCSIKTLSGIVHSYTDGLITRAADVVLKEGRKLVLGVRETPLHLGHLRLMTQAAEIGAVIMPPVPAFYHRPESVQDIVDQTVNRVLDQFDIDLPADLFNRWQGAKPVNI

SEQ ID NO: 7385 - protein, 505 aa, Xenorhabdus sp.
MCGIVGIVGFTSVNQSIYDALTVLQHRGQDAAGIATIDGNNEFRLRKANGLVKDVFETKHMLRLQGTIGIGHVRYPTAGSSSASEAQPFYVNSPFGITLAHNGNLTNAPELKKSLFENARRHVNTTSDSEILLNIFADELTQFPHFPLEPDDIFAAVAAMHQKIRGAYACVAMIIGHGLVAFRDPNGIRPLVLGKRTLADGRSEYMVASESVALDTLGFEFLRDVASGEAIYITEQGQLFTRQCAETPSLTPCLFEFVYLARPDSFIDKISVYNARLRMGRKLGEKIAREWEDLQIDVVIPIPETSCDVALEIAHILDKPYRQGFVKNRYVGRTFIMPGQHERRKSVRRKLNANRAEFRGKNVLLVDDSIVRGTTSEQIVELAREAGAKKVYFASAAPEVRFPNVYGIDMPNANELIAHGREVNEIRQLIGADALIYQDLSDLIAAMHEENPDIEKFECSVFDGIYVTKDIDQTYLDYLENLRKDDAMKLQGQSEIESLEIYNEG

SEQ ID NO: 7386 - protein, 221 aa, Xenorhabdus sp.
VGTIVLVALSVIVLPMLLDGDKKYNEEKFASIPLVPKPGDEENIDSIPPLTQSMPSAPPEGAAEAMQTQVQEPQQDTDTFSGSLAPESVPEPSAATAGYTGEQAKPDLSVIPKTETKPQVKVENRTESQPEVKPRAAEQAPQAVAYVVQLGALKNADKVNEIVARLRLSGYQVYTVPSSAVQGQLTRIYIGPNASKQALGSILPELRELTGLQGQIKNYTP

SEQ ID NO: 7387 - protein, 432 aa, Xenorhabdus sp.
MSDTLQIPQATSSLTMWLSYLGNLHSKAIDMGLERIGTLADKLDLLHPAPKVITVSGTNGKGTTCHTLESILLAAGLKVGVYSSPHLVRYTERVRIQGNEPTEQDFCRVFAGIESQRGDISLTYFEYGTLAALQLFKEADLDVVILEVGLGGRLDATNIVDADIAAITSIALDHTDWLGADREHIGREKAGIFRHGHFAVVGEPDMPHSIADVADELGAKLFCRGKDWDFTQEKESWHWRTVDRQFNSLPIPNLPLANAATALGVIHCLLQQNDKVSQAIDEQAIHDGLKRAQLPGRFQIIGEKPRIILDVAHNPHAAGYLAQKLAELSRPQGSKVRGVVGMLQDKDIAGTLACLSGQIDEWYCASLHELRGAEAAVLAEHLPDARIFPDVEQAWHQAMEEASERDIIVVCGSFHTVAHVMESLEEMKGRGK

SEQ ID NO: 7388 - protein, 314 aa, Xenorhabdus sp.
MSWIEKILNKSKIMQTRKANIPEGVWTKCDSCSQVLYRAELERNLEVCPRCDHHMKISARQRLQSFLDEGSTTELGSELEPKDILKFRDIKKYKDRLAAAQKQTQEKDALVVMKGLLHDMPVVAGASEFNFMGGSMGSVVGARFVRGVEQALEDNCPFICFVSSGGARMQESLMSLMQMAKTSAALAKMQDRGLPYICVLTNPTFGGVTASMGMLGDINIAEPKALIGFAGPRVIEQTVREKLPEGFQRSEFLLEKGAIDMIMRRPEMRERIAGMLAMMTHQPHPDAKKEVTEIVAEPADVEVDININPNKEDV

SEQ ID NO: 7389 - protein, 222 aa, Xenorhabdus sp.
IDFAKFIVDFILHIDAHLAELVANYGDWVYGILFLIVFCETGLVVTPFLPGDSLLFVAGALSALDSNDLNVHIMAALIIAAAIIGDAINYTIGRVFGEKLFNNPNSRIFRRSYLEKTHQFYEKHGGKAIILARFVPIIRTFAPFVAGMGKMSYRHFAAYNVIGALIWVLLFTYAGYLFGDMPIIQQNLKLLIVAIIFISILPGVIEIWRHRRATSKKASDNN

SEQ ID NO: 7390 - protein, 281 aa, Xenorhabdus sp.
MSDTELNQSVPEAKKVKIALGIEYDGSRYYGWQRQQEVRSVQACLEKALSKVANEPIAVFCAGRTDAGVHATGQVVHFETSAQRKDAAWTMGVNTHLPADIAVRWVKAVDDEFHARFSATARRYRYVIFNHRYRPAVLAKGVTHFHYPLDEKKMHEAAQCLLGENDFTSFRAVQCQSNSPWRNLMHINVSRHGHYVVVDIKANAFVHHMVRNIVGSLLEIGCGNQGVQWMTELLALKDRTKAAATAKAEGLYLVAVDYPAHFGLPEPVMGPLFLADELVSD

SEQ ID NO: 7391 - protein, 336 aa, Xenorhabdus sp.
MSEGWNIALLGATGAVGEAILALLQERQFPVGELHLLASEQSAGSIKRFNGKNVTVRDVAEFDWSQVQLAFFAVGMEVTAQYIAQATEAGCLVIDSSGLFAAEPDVPLVVPTVNPHVLAEYRNRNIVAVADSATSQVLTAIKPLIDTAGIARLQLTNILPVSVHGKAAIDELAGQSARLLNGIPPDEGRFNKQLAFNLLPLLPDAEGTVREERRIVDQVRRILQDEGLPVSVSCVQSSVFYGIAQMVSVETLRPVGVEEARDEFERLEEIQVSEEGDYPTQVTDASGADGLSIGCLRNDYGMPEMLQFWSVADNIRFGGALMAVEVAEKLMQEQFY

SEQ ID NO: 7392 - protein, 375 aa, Xenorhabdus sp.
VKILVDENMPYAEQLFKQLGEVQAIPGRPVPEGVLEHADAFMVRSVTKVNEFLLKGSAVKFVGTATAGMDHVDQPWLEQAGIGFSAAPGCNAIAVVEYVFSALMILAEQDQFQLKDKTVGIVGVGNVGGRLAARLAALGVKTLLCDPPRADRGDEGEFWSLEKLVKEADILTFHTPLNTSGPYQTYHLADAELLSALPDNRILINASRGEVVDNQALLSALQNGKKLRVVLDVWEPEPNLSLPLLELVDIGTPHIAGYTLEGKARGTTQVFEAYCEFLGKPQKTALSDLLPESDFSHITVRGEVTQSILKRLMHLVYDVRRDDAPLRQVAGQNGAFDQLRKNYPERREWSSLTVHCDSESSAQLLSQIGFDVKVI

SEQ ID NO: 7393 - protein, 209 aa, Xenorhabdus sp.
MEMTVEGQRFLAPPEFCIWIPKNSVHSSYNRKTMRFWIIDISPQLSKSLPPHPCLIRLSSIFHAIMQDFFSRKVIRPQTDKDQRLTQILIDQLELSPSQNTYLPSSKDKLLAPILQELEHNPADNTSLVEWAKKRYTSERTLSRRCQQELGMSFSEWRQRLRFLHAISLLAQGKSVYEVAFDVGYSSSSAFIAMFQQIAGTTPERFRKG

SEQ ID NO: 7394 - protein, 219 aa, Xenorhabdus sp.
MKMARKTKQQANETRQHIIEAAIKVFSERGVSATSLSEIAVAAGVTRGAIYWHFKNKTDLLFAVCKMPANKIDALEKEYQAKYPNNPLLVLRYILIFLLKVMTTDSQNRLLMEIFFHKCEFVGEMSSLAEQIREVCISDYQKIEDMLVMCIQSGELPYDLDIRRSAIMLRALMTGLLENWLFAPESFNIQAQSESLVDGFIDTLKYSRHLRRIEELRSE

SEQ ID NO: 7395 - protein, 1153 aa, Xenorhabdus sp.
MVQFNRGLSVLLNKTGLSCNKRPDILYFRQLGLISLLFFLLFFLHPASAAFSNDVPTRDDIQNQLKVLTDRNEHTLEERASIADLEKALSFFDKIEKIQQDSEQLAKNLQQLPQKSQQLTAELASLKNNSQQNEDEYKHNLATLSLKQLESKQSVTLNSLQKAQDNLANYNSQLIGLQTQPERTQNLLFNNVQRLQQLRNLLNNAVTEQSDVRHTEIELLQVEQAFLTQQKEYQKSALRANTQLQTLLQLQRDYTSFQIEQLERHVQFIQDMVNGKHLIDSEETAKEAQSSDDTSPHIQSNPLVREEIMVNREFSERLVAATRDNNQLVKKKIQVKNFLDRAIQSERDLKEQVKVLRGSLLLSRILFQEQLKVPQTVLTKDLPTKIADLRLEQFEIAQQRDQLYLVDDYINQLLNQHANDIKNESQEAVGEIRNAIGQLLEIRRELLNQLNNQLGQQITQAINLQMDQQELLNVTQSLEQTLAQQIFWVNSNKPMNWVWLKSLPLLAHEELTHFSVHFTIRGIISGLQNSVHFVIPLLLVGLFLRWQTKSINAHLKKISAEIGQLRRDSQLHTPLALVLTLIKTLPLAFIILAIGYWYSKSEDELGGMIWDFSSHLALFWVVYGSSYQILERGGIGEQHFSLDREVCSLFRKNLVRLSVALLPILFWVTLGVKHPLRLADDVIGQCTVLICLLFVFIFVFPFCRQVWREKSSHMIRTIVVTMLTFSPLILIVLMVSGYFYTTLRLSERWLYSAYLLLLWHICYQSCLRGLSLAARRIAYRRAMSRRQAQAKEGAEGEVIEEPPMALELINQQSLRLTTMVLFLIFFMAFYWIWSDLVTVFSYLDGINLWQYSTTTDQGNILQHVTLKDLALSVAMLGISWVMMRNLPGLLEVLVLSRLQLQQGSSYAIKTTLTYLIIGVGGISALGTLGVSWNKLQWLAAALSVGLGFGLQEIFANFVSGLIILFERPVRIGDTVTIGTYSGSVSKIRIRATTITDFDRKEVIIPNRAFVTERLINWTLSDTITRIIIKVGVAYGSDLDKVKEVMLQAAKSNHRVMSEPEPQVYFMSFGASTLDHELRLYVRELGDRSRTVDEVNRSIDKLCRENDINIAFNQLEVYLHNGQGNSLQEVKRSISGSEHQTGEPPMPDDKPFLP

SEQ ID NO: 7396 - protein, 184 aa, Xenorhabdus sp.
IMTANAQKLQFIKDSIETIPDYPKAGILFRDITTLLDNPVAYQATIDLLVAHFQDKGITKIVGTEARGFLFGAPVALRLGVGFVPVRKKGKLPRETLSETYALEYGTDTLEIHKDSIKAGDKVLVVDDLLATGGTIEATVSLIRRLGGEVSEAAFIIGLPDLGGTERLKNQGIDSYTLVEFPGH

SEQ ID NO: 7397 - protein, 668 aa, Xenorhabdus sp.
MSYQVLARKWRPQIFSDVIGQQHVLTALANGLEHQRLHHAYFFSGTRGVGKTTIARLLAKGLNCETGITKTPCGQCVNCLEIEQGRFVDLIEIDAASRTKVEDTRELLDNVQYAPARGRFKVYLIDEVHMLSRHSFNALLKTLEEPPEHVKFLLATTDPQKLPVTILSRCLQFHLKALDVSQISGQLEHVLNAEQIESEARARQLLARAADGSMRDALSLADQAIALGGGKLTADIVSQMLGTLDDEQPLEMVEALVRADGQKLLTLVEQVAARGMDWENLLVEMLSLLHRVAMIQLLPQQPEIEPSSTEGRLRLLARSMPPSDLQLYYQALLTGRKDLPYAPERRMGVEMALLRALAFHPKTIIEEIPVSNNAEIPVASGIAFMPPQQQPVSDNFGSVSPESGMADKQPSAQKQRMAPREGLEPVADSPTAKLLQAKNLLSRQEGTSSKGSAPPKKAEPAASVKTKPASSALERLVAVAEQRPQSFVPKAREVKPVKQEAYRWRAKNIEEKRVVTTPKAIKSALEYEKTPELVKKLAIESRQRDQWAAEIDNLNIPKLVQQVALNAFKEQINENQFCLHLRSKQRHLNSASAQRSLSEALTELHGKPIELSIIEDDNPAVKTPLEWRQAIYEEKLAQARQSIISDKTIQTLQQLFDAEVDEESIRPV

SEQ ID NO: 7398 - protein, 109 aa, Xenorhabdus sp.
MFGKGGLGNLMKQAQQMQDKMQKMQEEIANLEVTGESGAGLVKVTINGAHNCRRVEIDPSLMEDDKDMLEDLIAAAFNDAARRIEETQKEKMASVSSGMQLPPGFKMPF

SEQ ID NO: 7399 - protein, 118 aa, Xenorhabdus sp.
VVESPADIHAIEQTGQFAGRYFVLMGHLSPLDGIGPMDIGLDRLEERLSSETLSEIILATNPTVEGEATANYIAEMCSQYGVTASRIAHGVPVGGELEMVDGTTLSHSLAGRHRITDL

SEQ ID NO: 7400 - protein, 629 aa, Xenorhabdus sp.
MKDQETRGFQSEVKQLLQLMIHSLYSNKEIFLRELISNASDAADKLRFRSLSAPELYENDGELRVRLAFDKENKTITISDNGIGMTRDEVIDNLGTIAKSGTKAFLESIGSDQAKDSQLIGQFGVGFYSSFIVADKVTVRTRAAGAATEQGVFWESTGEGDYTVADIEKAERGTEITLHLREGEDEFLNDWRLRSVIGKYSDHIALPVEIETQTKNEEDDSVTVAWEKINKAQALWTRGKAEISDDEYKEFYKHISHDFADPLSWSHNRVEGKQEYTSLLYIPSQAPWDLWNREHKHGLKLYVQRVFIMDEAEQFMPNYLRFIRGLIDSNDLPLNVSREILQDSSITRNLRSALTKRVLQMLDKLAKDDAEQYQSFWQQFGLVLKEGPAEDGGNKEAIAKLLRFATTHNDSASQTVSLEEYVSRMTEGQEKIYYITADSYAAAKNSPHLELFRKKGIEVLLLSDRIDEWMMSYLTEFDGKSFQSVSKADESLDKLADENKADQEEEDKKLEPFVERVKTLLGERVKEVKLTHRLTDTPAIVTTDANGMTTQMAKLFAAAGQSAPEVSYNFELNPDHNLVKKAAEIQDDSQFADWIELLLEQALFAERGTLDDPNQFIRRMNQLLLAESA

SEQ ID NO: 7401 - protein, 214 aa, Xenorhabdus sp.
MRIILLGAPGAGKGTQAQFIMEKYGIPQISTGDMLRAAVKAGSELGLKAKELMDNGKLVTDELVIALVKERIKQDDCRNGFLLDGFPRTIPQADAMKEAGVSVDYVLEFDVPDEIIVDRIIGRRVHAPSGRVYHIKFNPPKVENRDDITGEELTVRKDDQEDTVRKRLVEYHAQTAPLVSYYQQEAQAGNTSYFKLDGTRQVAEVSEELARILG

SEQ ID NO: 7402 - protein, 321 aa, Xenorhabdus sp.
MSNRNYGVLLVNLGTPDAPTPAAIRRYLAKFLSDRRVVDIPPLIWKPLLYGFILPFRSFRVARLYQEIWTDEGSPLLVYSKRQKQRLSEKLGNIPVELGMTYGSPSLTQAVDKLLQQGVEYLIVLPLYPQYSSTTSAAVFDSLSKILQGYRTIPHLKFIRSYAQHPAYIAALKETVEQSFEKHGQPDRLILSYHGIPERLAEMGDIYPQNCLATTKLLTELLDYPADRIMMTYQSRFGRLPWLAPYTDKTIALLPEQNVEHIQVLCPGFAADCLETLEEIKQQNKAIFLDAGGKKFEYIPALNDNEAHISLFMQLINDAMR

SEQ ID NO: 7403 - protein, 346 aa, Xenorhabdus sp.
DEIDLFELFSVIFQSKYLIIAVSFIFAVIGFGVASFLPQKWTSTAAVVQPELEQFQPLKNVLTELNVLSLDPKITEYSLFKRFIENYNSRVLREEYLVDTDYFRTLLASSEDITAQAKRSLIEQIVNKNISSSVPNKKDKDDEFYETTLSFSAGTAEDSYKLLSGYIKFISSVVRDQIKDELNDAVSQKLVYSKKMYDIDLDRITNMRSTDIERLKYAISIANSAGIKKPVSSGGAVVKDDPDYSIALGTDALQRKLQITEGITDATTIDPDLRNRLLYIKNLEAVNIDKLDFQPFKYMQEPYEPTAKDSPKRLLILIGAGFIGFILSVMFVLMRHMVRSRQKQAA

SEQ ID NO: 7404 - protein, 436 aa, Xenorhabdus sp.
MKFPGKRKSKHYFPVSLRDPLLQPIKEMMDTENNRAYIVGIDQILVDIEAKVDESFIQRYNLSQGHSLVIEDDVAEALYNELADNNLISHEFAGGTIGNTLHNYSVLADDKSVLLGTMCNNIQIGSYAYCYLCNTSSRMDLNHLQGVDGPIGRCFTLITENGERTFAISPGLMNQLKPESIPEHIIAEASALVITAYLVRCKSGEPMPEATMKAIEYAKKHNVPVVLTLGTKYVIADDPQWWRDFLAENVSVVAMNEDEALELTGFSDPLLAADMALNWVDLVLCTAGPAGLYMAGYTEEESKRQTLHPLLPGAIAEFNRFEFSRAMRQDDCQNPMRVYSHIEPYMGGPEKIMNTNGAGDGALSALLHDITANSYHRMNVPNSSKHMRSCLTYSSLAQVCKYANRVSYQVLSQHAPRLTRGLPEREDSLEESYWER

SEQ ID NO: 7405 - protein, 81 aa, Xenorhabdus sp.
MVASAWEKDKTYDITILHTNDHHGHFWQNDHGEYGLAAQKTVVDSIRQEVAKKGGSLLLLSGGDINTGVPESDMQDAEAGF

SEQ ID NO: 7406 - protein, 60 aa, Xenorhabdus sp.
MRLRKCTSIETLERVIEKNKYELSDDELELFYSAADHRLAELTMNKLYDKIPSSVWKFVR

SEQ ID NO: 7407 - protein, 95 aa, Xenorhabdus sp.
VLNRTDNHWINDLTSEKNLRLNELIEHITAFVWSFKIKYTDNYNLSTLIDKYLDETYNLFGSDKISFVELTNWQRTNEHLTSILLHDLNASLSKI

SEQ ID NO: 7408 - protein, 172 aa, Xenorhabdus sp.
VLEKQISMLAAELSSLPDIPFSIARFDQALFHSHTNKLSGYMLEIHQNMDQLKSCVRDNRTVQVKFLSERLVMQIEALKRELSTQVLRKQEDKFGRQSQEQDLYHRLAEHQDYERRLMAMIDDRELQLAQKAESVDKYKLQKEIAALAGRLARCRQALMRIERTIEKQEHSD

SEQ ID NO: 7409 - protein, 570 aa, Xenorhabdus sp.
MEHSTPLITTIVGGFLLAYLLGMLAQRLKISPLVGYLMAGVLAGPFTPGFVADTSLAPELSEIGVILLMFGVGLHFSLKDLLAVKSIAIPGAIAQIAVATLLGAGLSKLLGWGLFSGIVFGLCLSTASTVVLLRALEERQLIDSQRGKIAIGWLIVEDLAMVLALVLLPASAGILDNHNTDIGQLLLELAITVGKVVAFILLMIFVGRRLIPWLLAKTASTGSRELFTLAVLTIALGVAYGAVELFDASFALGAFFAGMVLNESELSHRAAQDTLPLRDAFAVLFFVSVGMLFDPIILIQQPIAILGTLTIIIIGKSVAALLLVRLFGHSRRTALTISVSLAQIGEFAFILAGLGVTLGVLDGDARNLILAGAILSIMLNPILFSLLDRYLEKTETIEEQILEETLEEETQIPVNICGHAIVVGYGRVGRLLCQRLQEKHFPLVAIEDTRARFEELGEMGISAVMGNAAREDIMALARLDCACALFLTIPNGYEAGKIIESARAIRPDINIIVRAHYDDEVTYLTARGADHIIIGEHEIARAMADSLPESTPDCPIALPSAFSPTNSSAA

SEQ ID NO: 7410 - protein, 269 aa, Xenorhabdus sp.
MKPGIYYDISNEDYHKGEGVSKSMLDKVAKTPALLIWDRDAPEDEEKRNALDMGTALHCLLLEPDEFDNRFIKAPEFNRRTNEGKQEEKEFIEGCKSTGKIIMDYEQHRKLQLMRDSVMAHPGGRKIFEHDGTCETSIYWDDPETGELCRIRPDKLIPDENLIVDVKKVSGINRFPSNIEEYRYHVQDAMYSEGYRQHTGGIIPTFCFLAVSESIDCGKYPVRLFVLDQYDREVGFDLFRRDLNTYHECRQKGNFGLGFEVVQRPEWAR

SEQ ID NO: 7411 - protein, 54 aa, Xenorhabdus sp.
MAGISYEKVEEDRLNEEYTIGKVGIQDEGGIYFEQMGVYCTDYPEDGAMSLEDR

SEQ ID NO: 7412 - protein, 130 aa, Xenorhabdus sp.
VHGHTQKTTSSQEPARMEAPSRLIPYFNCCAYSSLTEVIMYPITLSYTYAETTSRVLHGRTEITFTYPADLVLDIPFTEYAKRSSPDISDMYTHIRTHCDEERAAEEMKKAGYTYHEVMAIAQYFEEEVV

SEQ ID NO: 7413 - protein, 93 aa, Xenorhabdus sp.
MRYDSNETYWNDRRNEADDIITAAACQEMTEKELDEEVEKIVLSFIDNSLPEEAGKVLNPIFKSNPSAWDRYVGVLNEVVMIGLKDKIIGRAA

SEQ ID NO: 7414 - protein, 278 aa, Xenorhabdus sp.
MSNVINPFGSNVPQAQSTQGMVAVEQQRAIQEVQAAMVIAKKFPRDPIVAMDKILQACTRATLAESALYSYSRGGAEVTGPSIRLAEAVAQNWGNIQFGIRELEQKSGESTVEAFAWDIETNTRQVKTFTVPHIRFTRNGKKKLEDPRDIYELVANQGSRRLRACILSVIPGDVIEAAVNQCDVTLKSNADTSPESIKKMVDVFKTEFGVTSDQIQKRIQCRVEAMRPAQMVQMKKIYASLRDGMSSVDDWFDKPETTQKQVDKLNSMGDKADDRGTE

SEQ ID NO: 7415 - protein, 92 aa, Xenorhabdus sp.
MSTNYDSKLIVGTELENVSISDEEIEDLVCEGYARHGSYFSGEFYFIGKEIHTATITSENFDEEYLSLKDEVAKALGVDIDDVSLRNGVLIW

SEQ ID NO: 7416 - protein, 109 aa, Xenorhabdus sp.
MIEHHLNVFKRIHDSRWPWLYHCWTCGARVSIHPGTDIPMGSLADKKTRQARVSAHRYFDDVVRSRNLERTEAYQWLARQLDISFNTCHFGWFDTDMCKKAESICREFK

SEQ ID NO: 7417 - protein, 127 aa, Xenorhabdus sp.
MGSIGEGFTLEEVVNGAWQSGFIDVDCPYGQFSDIINFTDKDGNIKGKLEITDIWIQRVQSISKKDAIAEGGPPSHTSIDEVSQQFGFPDFSRSWFAQTWWSIYDKESWDANPWVWVIEFRRINNEQ

SEQ ID NO: 7418 - protein, 61 aa, Xenorhabdus sp.
VNIPKISIEISRKSAKEFCDFYDDDKLSDESLVLSITDTVQDALNDIEFPASEIKTTLTDD

SEQ ID NO: 7419 - protein, 118 aa, Xenorhabdus sp.
MKLMHRHQEKNEVFSHSFQLTQIIASVWGDPSDITDVVWHSGYRKPEREATEIAQLTIDIMEGVPDGVPYSARPKNLNDILMAELSDIIFDATWSDKATPASVARVILESGYQKGGEQ

SEQ ID NO: 7420 - protein, 518 aa, Xenorhabdus sp.
MGKEFNISVNQRETVYQSDPTLLFNELCNNRPATLLLESAEVNSKNAIKSMLIIDSAMRITANGRQVDFAALTENGKNLLPILAGLLSDKAQITLEAHTLQAQFPAIKENLDEDSRLKADSVFDALRALTQLSTLAEDSDAIFSGGLFSYDLVAEFEQLPILKTSQRCPDFCFYLAETMMVIDHPRQHAILQTTRFGESEAEEQRLNERLSALENIIAKPRQPLTPVTLPVIQIACNRSDEQYADIVQQLQGFIRKGDIFQVVPSRRFTLPCPAPLNAYHTLKRLNPSPYMFFMQDQDFCLFGASPESALKYDADSQQIEIYPIAGTRPRGRNASSELNADLDSRLELEMRTDAKELSEHIMLVDLARNDIARICESGSRYVADLMNVDRYSFVMHLVSRVVGTLRHDLDIFHAYQACMNMGTLTGAPKVRAMQLIAQYENERRGSYAGAVGYFTGKGDFDTCIVIRSAYVENGEATVQVGAGIVLDSVPQSEVQETQSKSRAVIHAIAQAHNTEVTF

SEQ ID NO: 7421 - protein, 198 aa, Xenorhabdus sp.
MANILLIDNVDSFTYNLVDQLRCGGHQVVIYRNTVSVEIIMAQLENMASPLLMLSPGPGKPSEAGCMPQLLQQVIGKIPVIGICLGHQAIIEAYGGNISAASEILHGKSTLAAHDGLAMFSGLPNPLPVARYHSLVGVNIPATLIVSAYCHDTVMAVRHDENRVCGFQFHPESILTTQGTRLLEQTLAWALNSQESGQ

SEQ ID NO: 7422 - protein, 332 aa, Xenorhabdus sp.
MQLILEKLFSAQALTQQESQKLFTAIICGELSEPQLAAVLISMKLRGEQPQEIAGAAQALLANASSFPRPDYPFCDIVGTGGDGTNSVNISTTSAFVAAACGLKVAKHGNRSISSRSGSSDLLAEFGIALNASAEESRRALDEISICFLFAPQYHSGFRHAVNVRQQLKTRTLFNVLGPLINPARPPLALIGVYSPELVNPIAQTLQVLGFQRAAVVHSGGMDEVALHAPIQVAELNCGEIIQYQLTAEDFGLPNHPISSLSGGTPQENRHMTSLLLQGQGKKAHVDAVAANVALLMKIHGQEDLRQNTQQALDTIYSGRAYEKVIALAAGI

SEQ ID NO: 7423 - protein, 454 aa, Xenorhabdus sp.
MKSNVLQKIVEDKALSLITRKAEQPLESFLDAVVPSHRRFYQALTHKQTVFILECKKASPSKGLIRSDFDPVRIAKTYQPYAAAISVLTDEKYFQGSYDFLRMVSAAVHQPVLCKDFIIDPYQVYLARYYQADAILLMLSVLDDDTYRELSALAHSLNMGVLTEVSNEAERHRAIALGAKVIGINNRDLRDLSIDLQRTQKLAAGLPKETIVISESGIHSHQQVRDLSQFAHGFLIGSALMVQSDLDLALRRLILGDNKICGLTRPQDAKAALQAGAVYGGLIFAEKSPRRISQQQAQQIINEVPLLYVGVFQNQPVDFVCQTARALSLTAVQLHGNEDQPYIDALRSLLPENCEIWKSVDMSKTEVFSGLSNIDHLLLDNGFGGTGKTFDWKLIDKGSQHNSVLAGGLNAENCRQAAALGCYGLDFNSGVEIQPGIKSSQKIKQVFQQLRCYP

SEQ ID NO: 7424 - protein, 251 aa, Xenorhabdus sp.
LNPYFGDFGGQFVPQILVPALDQLEEAFIEAKDDPEFQQEFHNLLKNYAGRPTALTLCQNLTKGTKTRLYLKREDLLHGGAHKTNQVLGQALLAKRMGKEEIIAETGAGQHGVATALACALLGLKCRVYMGAKDIERQSPNVFRMRLMGAEVIPVHSGSSTLKDACNEAMRDWSGSYDKAHYLLGTAAGPHPYPTMVREFQRMIGEEAKAQILEKEGRLPDAGIACIGGGSNAIGLFTEFIPETHVRLIGC

SEQ ID NO: 7425 - protein, 484 aa, Xenorhabdus sp.
MYNSGEKNIDLQAGDEKTEQIEIRNSVFSFPVCSQVAKSISWTATTYFNNKEYKSCYVDLTFSYNPFALLGPGMGWFYHVDTKRGCGLEVSADCGGNNCLNNDGTPITDDYNITITIKDDKNWESPRITSPKSGTQLSNNYTTILGKGLNEDGSLPEIYAFVWSETYPTRSTGDGDNWMAQIWWPCYIKSDIQIKDVVYTTIMLYGPWCGATITSMQDGQTIPAGKYSLSGLVNSDTIDESKRMQVKITGYNRDGSIYLPTKNYTPTVDTDTGRWSLEDIEAVCSIKYKASSSVSSSYIDTSGMPGLPEVNYSVQSCPAKITSPKPNSTVGNNYITVSGTGRTEDGSWPELVTSFDSHSYSTQPTGDGDNWTAHLWMPCGISGTVSISGMGDSGVTFNGPPCGETITSMKDGQTIPPGKYSLSGRINSDTADDEKHMQVQITGYNSDGSIYSPAKSYTPNVDTDTGEWSLEGLEAVCSINYSVN

SEQ ID NO: 7426 - protein, 373 aa, Xenorhabdus sp.
VFDGDVSNRKMASALVEEYAQSIFNEGNPLGMAMVVIDNNQVIHHSFGETYPGSGVKPSQNSLIRIASITKLMTSEVMIKLAEQKRIKITDPLQKYTYHGVHVPDFGTDQPIRLYHLASHTSGLPREQPGGKWGRPVFIWPTQSNRWNWLKNADLETAPGTTASYSNLAYDLLADALSKATGEPYSRLLHEEITLPYKMKDTTLTPTPAQCARLMEGIKSSPCLNTIAAAGSGGIYSTPADMQRWMQQFLSSHNHLRKQTASREQGIYFKRAELASIRGMDVAGKADGIGLGWVYMNGKKDVPGIYQKTGGGGGFNTYMAMIPEQNIGVFIVMTRKEHSKFHQVTKGVNELVTALAQNHNQIPEQPVMELVKK

SEQ ID NO: 7427 - protein, 502 aa, Xenorhabdus sp.
MEFSVKSGSPEKQRSACIIVGVFEPRRLSPIAEQLDKISNGYISALLRRGELEGKVGQTLLLHHVPNVLSERILLVGCGKERELDERQYKQIIQKTISTLNETGSMEAVCFLTELHVKGRNNYWKVRQAVETAKESLYVFDQLKSSKTELRRPLRKMVFNVPTRRELTSGERAIQHGLAIAAGIKATRDLVNMPPNICNAAYLASQARQLADSAENLVTKVIGEEQMKELGMNAYLAVGQGSQNESLMSVIEYKGSKDPNAKPIVLVGKGLTFDSGGISLKPADGMEDMKFDMGGAASVYGAMRIVAELQLPINVIGVLAGCENMPGGRAYRPGDILTTMSGQTVEVTNTDAEGRLVLCDALTYVERFEPELVIDVATLTGACMVALGSHYTGLMSNHNPLAHELLNASEQAGDRAWRLPLGDEFSEQLESNFADMVNSCGRLGGAITAGAFLSRYTAKYNWAHLDIAGTAWRAGKQKGATGRPVALLAQFLLNRAGLNADD

SEQ ID NO: 7428 - protein, 154 aa, Xenorhabdus sp.
MKNATFYLLEKMSPEQSSSLDDLQPHEWLACQLAADQWRAGKRVLIACESQQQAEKLDEVLWQREPGQFVPHNLAGEGPRYGAPVELCWPQKRGNAPRDILITLLPHFADFATAFHEVVDFVPIDENLKQLARERYKSYRSVGFNLTMATPPTY

SEQ ID NO: 7429 - protein, 965 aa, Xenorhabdus sp.
MEKTPATKTQSEPSLDKTYNPTEIEQPLYDHWEKSGYFKPNGDTSRESFCIVIPPPNVTGSLHMGHAFQQTIMDTMVRYQRMQGKNTLWQVGTDHAGIATQMVVERKIAAEENKTRYDYGRDAFIDKIWQWKAESGGTITNQMRRLGNSVDWERERFTMDEGLSKAVKEAFVRMYQDDLIYRGKRLVNWDPKLRTAISDIEVENREVKGSMWHLRYPLADGAKTAEGKDYLVVATTRPETVLGDTGVAVNPEDPRYKDLIGKEIILPLVNRRIPIVGDEHADMEKGTGCVKITPAHDFNDYEVGKRHSLPMINILTLDGDIREAAEVFNSNGEASDAYSTEIPAEYRGMERFAARKAIVAEFEKQGLLVDIKPHDLTIPYGDRGGVVIEPMLTDQWYVRTAPLAKVAIEAVENGDIQFVPKQYENMYYSWMRDIQDWCISRQLWWGHRIPAWYDAEGNVYVGRNEEEVRRENNLGADIILTQDDDVLDTWFSSGLWTFSTLGWPEQTEALKTFHPTDVLVSGFDIIFFWIARMIMMTMHFIKDEDGKPQVPFKTVYMTGLIRDEEGQKMSKSKGNVIDPLDMIDGIPLENLLEKRTGNMMQPQMAEKIRKRTEKQFPEGIEAHGTDALRFTLAALASTGRDINWDMKRLQGYRNFCNKLWNASRFVLMNTEGQDCGQNGGEMSLSLADRWILAEFNQTVKAYREALDTYRFDIAANILYEFTWNQFCDWYLELSKPAINKGSEAEVRAARHTLIEVLEGLLRLAHPIIPFITETIWQRVKVVKGIDADTIMLQSFPEFDQAKVDELALNDLEWIKEAIIAVRNIRAEMNIAPSKPLEVLLREANADAQRRVAENLNFLQAMGRLSSVTVLAAGEEAPVSVTKLINGAEVLIPMAGLVDKDAELARLDKEIEKLDKEISGIEGKLSNEGFVSRAPEAVVAKERERLATNNAAKEKLLAQKVTIAAL

SEQ ID NO: 7430 - protein, 242 aa, Xenorhabdus sp.
MIQLGFTHLTYAESTLNKIQSSGIFRIGTEGAYAPFSYHDASGKLTGFDVEIGREIAKRMKVKPEFIEGKWDGLIAGLDAGRSDAVMNQIAITPERQKKYIFSLPYVISEAVLITRTDNNKIKTFSDLKDKKSAHTLTNNFAQIARQHGAEIIATNGFNQEVELVSTGRADATINDKLSYLDYKKHRPEAPVQIVATDTHAAQTAILLRKNDTGLKAAIDEAITEINADGTYQRIWDKYFSH

SEQ ID NO: 7431 - protein, 230 aa, Xenorhabdus sp.
LSLALDSLWPMIYAGLTFTIPLTLITFALGLTLGFIVALIRLYGPKPLVAVVRFYVWLIRGTPLLVQLFLIFYALPSIGITLEAFTSAVIGFTLNVGAYTSEVIRAALNSVPKGQWEASHSIGMSWWQSLRRIVLPQAARVSIPPLSNTFISLVKDTSLASVITVPEMFLAAQRIAAVTYQPLILYTEAAILYLLLSSLLSALQTRMENKFSQQYAKNSNNKEANNDSAL

SEQ ID NO: 7432 - protein, 254 aa, Xenorhabdus sp.
MIQLSNIEKSFDGQKVLKNINLTIKEGSLTALIGPSGSGKSTLLRCINLLEIPQAGQLMLGKERITFTGKERLSHKEIQRFSLQTGMVFQNFQLFPHLTVIENIMEGLIWVQKWPRERARERAMELLEKVEMSHKADVWPTTLSGGQQQRVAIARAMAPSPKVLLCDEPTSALDPELSKEVVSVLKQLADEGTTMLMATHDLRLAANLAHDVIFLEFGEIIESGSAKHMFTRPDHQRTIEFVSTLTETLPDWQI

SEQ ID NO: 7433 - protein, 257 aa, Xenorhabdus sp.
MKVFLKLLLAGAVTLAISAPSYAGKDLDAIKASGVFKIGTEGTYPPFTYHDTSNKLTGFDVDIAREIARRMDVKPEFTEVKWDGLIAGLDAKRFDAVVNQVGVTPAREAKFSFSIPYTTSQVVLITRDNNDSIKSFSDLKGKRSAQSLTSNYGQLATSYGATLVSTDGFNQSIDLVATGRADATLNDRLSFLDFKNQRPNAPVKIVAQQTDASKSAVLLRKGDPELVEAINKALQGMKDDGTYARISEKYFGTDISK

SEQ ID NO: 7434 - protein, 175 aa, Xenorhabdus sp.
MKNSKEEEMAENTNHDYVIRPITQQDNPDIAAIIREVSAEHGLTADKGFAVADPILDTLYEVYSQPRSAYWVVEMAGKVVGGGGVAPLSGGDSNTCELQKMYLSSALRGKGVARQIVKQSLEFGVEQGFTRCYLETTENLKAAIALYEKLGFSYLDAPLGNTGHSDCEVRMVKML

SEQ ID NO: 7435 - protein, 199 aa, Xenorhabdus sp.
MNPFFHRHLLRLLDYKPKEIELFLSLSMKLKANKKSGKEIPLLAGKNIALIFEKDSTRTRCAFEVAAHDQGANVTYLGPSGSQIGHKESIRDTARVLGRWYDGIQYRGYGQAIVDTLAEYAGVPVWNGLTDEFHPTQLLADLLTMQEHSRKPLTEIKLAYLGDARNNMGNSLLEAAALTGLDLRLVAPKTCLAGCSISE

SEQ ID NO: 7436 - protein, 140 aa, Xenorhabdus sp.
VSECQKQATKTGGKITLTEDIVAGVQAADFLYTDVWVSMGEPKNVWQERIELLAPYQVNMDLVKLTGNPDVKFLHCLPAFHDEETILGKQLAEEFNLSGGLEVTNDVFESEYSIVFDQAENRMHTIKAVMVATLVQELDL

SEQ ID NO: 7437 - protein, 99 aa, Xenorhabdus sp.
VTLSLFSGNINADVFHAWMTQDLLPKLPSGAVIVMDNAPFHKRHDTIKAIADHGCLLEWLPPYSPDLNPIEPKWAEVKAIRRRERCSIDELFMTHVKYV

SEQ ID NO: 7438 - protein, 291 aa, Xenorhabdus sp.
LVEIFCGVDDFCRLFIPQWEQFCLDNGYRLRRRQGRMYPSEIMTILILFQRSHYRDFKNFYLEHIWQYHHHDFPSLLSYTRFISVAPSVLVPLSSYLTQLKGKPTDIAFIDSTSLRVCHNIRIPRHKVFQGIAQRGKTSMGWFYGFKLHLIVNHLGEILALKVTPGNVDDREPVRELSKDLTGSLYGDKRYLSQKLADDLAKTDITFITKKRRNMKALALAEWDNIMLKKRFIIETINGQLKNDSQLEHSRHRSITGFLLTILTGLVAYCLKEKKPSLKIFYSEEDISAIA

SEQ ID NO: 7439 - protein, 357 aa, Xenorhabdus sp.
FGVLDRYIGRTILQTILMTLFTLVSLSGIIKFVDQLRKVGQGEYTALSAGIYTLLSVPKDIQIFFPMAALLGALLGLGALATRSELVVMQASGFTRLQVAGAVMKTAIPLVLLTMVIGEWVAPQGEQIARNFRSQKMYGGSLMSTSKGLWAKDGNDFVYIQSVGKDSSLNGVSIYHVDNDKKLLSVKYAASAVYDTGNAQWKLSQVEESDLNHFGRITGSQYISADWKSRLTPEKLGVVSLEPTALSIRGLYQYITYLKQSQQDAGRYELNMWKKVFAPLSVAVMMLMALSFIFGPLRSVPMGFRVVVGISSGFVFYVLNEIFGPLSLVYSMPPMLGALLPSLLFFTVSVYLLLKRK

SEQ ID NO: 7440 - protein, 366 aa, Xenorhabdus sp.
VIIIRYLVRETLKSQIAILFILLLIFFSQKLVEVLGAAVEGNIPANLVLSLLGLGVPEMAQLILPLSLFLGVLMTFSKLYTESEITVMHACGLGKSVLVKSALILALLTAMLAAANVIWFTPWSSKYQEQVLADAKANPSLAAIMEGQFKPSNDGNMVLYIGNVKGNNFENVFLAQLRPTHNQRPSIVIADGGHMEALPNGNQVAVLHTGTRYEGTALLRDFRITDFNDYRAVIGHQNPDVDSGKVEQKSMAELWHSNDKDARSELHWRLTLIASVLIMALMVVPLSAVNPRQGRVLSMLPAMLLYLIFFLLQSSLRSNGSKGKLDPMIWMWLVNGVYFALALALNVWDTTPMRKLRSRFKTQGAA

SEQ ID NO: 7441 - protein, 207 aa, Xenorhabdus sp.
MDFIPGQYIGIEVPNGKCRYYSVANIPKDDGYVEIHVAKNKNGVFSDVICEKLKVNDVLWIYGPYGDFISDYHDEVRDIVFVATGTGFAPIKSIIESGVFNERKIHLFWGGRRKADHYFSEIVDNWKNTLGNFYFHMALSRSDEEDYPEVHCGYVQDVFKREIDQNNQIEVYMCGSPNMISDMSELLKESYQLNEDYIHVDVFYPNS

SEQ ID NO: 7442 - protein, 134 aa, Xenorhabdus sp.
MTILLENTGSDREKYIVLSDEQHEILCHQYGVFLTLDIVHFESFMHKNSTREYKEGLKRILPYIRNAHFNDVLNGEHVHLPLDEGNFDYHKVLSYMVSEGYQGNFIIEESGGGFSPEEFIIAGKKYVECLNGME

SEQ ID NO: 7443 - protein, 277 aa, Xenorhabdus sp.
DFKDTYIAALCRLKPDDIERTTLALSRFKKPKLNLLCVGSEIHIRKKFDSTKDSILLMLKDSLEYIANSVYTGKVSAILEDSSRGSFDLLEEKIELLTAYHVNDICFADTTGCATPLYISNLISYFKNKFPGIRFSVHCHNDLGLAVANSISAIDAGADEVQVTLGGVGERCGNASFEEIMAILSYRSEYKNRFKADIDMKDLIDLCNFYYDIINKLPHPNKPLLGKYAFSTCAGIHQNGIKKFPETYEFINPDTLGLERKFYFNRLSSSKLSQQDI

SEQ ID NO: 7444 - protein, 65 aa, Xenorhabdus sp.
MLIPIHFSSLTAKRAGKDLSVFATLVGGLCAPFINELNIQLMDIAIPIMVGMCIAFYELKIKKGA

SEQ ID NO: 7445 - protein, 140 aa, Xenorhabdus sp.
MADPHALEEQREETRLIIEELLEDGSDPEALYIIEHHFSADDFDRLEKAAVEAFKLGYEVTDAEELETEDSVILMCCDVISESRLEADLIIAQVEQLMDLAEKMGVNYDGWGTYFEDPNASDDEDDVGDLFPEEDEPRLH

SEQ ID NO: 7446 - protein, 206 aa, Xenorhabdus sp.
MTVLDSLLAFMVAATLLTLTPGLDTALVLRTAAAEGGKKAFQAALGIDAGCFIWGAMVAFGLGALIAVSELAFNILKWCGALYLCWLGLQMILRPNSDLGGENTSSVKTSNWFIRGMLGNVLNPKVGVFYVSFLPQFIPQGHSPMIWTFGLVAIHAALGTIWSLILIFATRPLSHVLKRGNVIKWMNRATGGLFLFFAVNLALSRR

SEQ ID NO: 7447 - protein, 181 aa, Xenorhabdus sp.
MDHIDTKISKFLSYVLRHQPESIGLTLDSEGWADISTLIKCAVKQGKRLNYPMIETIVATNDKKRFAISEDRKRIRAVQGHSAKPVDISYQEKIPPAVLFHGTATRFLDSIFKQGLVAGNRHYVHLSADEVTAIKVGQRHGKVAILKIDAQLMYEQGIKFHQAENGVWLTKAVSVAYISIK

SEQ ID NO: 7448 - protein, 157 aa, Xenorhabdus sp.
MILLYHADAAATNGLKAMVPHFFSDIKARYHYLSMAKKNFRGYLQGEQVRLKKYFYVLRPLLAVRWIEMGKGAPPIDFETLVAGTVYDSQLKAEIADLLRIKRAANEAEYGLRKPGVHAFIESELSETVVRCELKDNRERSQDLLDSYLKRWVLKNR

SEQ ID NO: 7449 - protein, 766 aa, Xenorhabdus sp.
MAFIKDAVSSLLGGGNDASWQWAEHLHPASFRGVPFAVVSGESVFGRRQAVHEYPYRDTAWLEDLGRATRRFTLRGFIIQNSAVYHAPDVITQRKNLVAACETGSTGTLVHPTLGELTVSVTESGLRMNESKEFGRVFEFTLTVIESGLKVFAVTNSTKSATEVKKHWLQTYTTTLAKYIAMVRGEIRSVTQGIRIIKQTANQWIGMVTRSMDEVTNLSDMLKTTFGSERYGRYQRGKIGGTVSGATGLRSRDDRQHNEADIIRKTTAGVVMSRKTITDRLDTLNAAHTVETFSEAAGQVVIAIIDSSGSVDEKVAIFEALAAFQNTRYQQGAVDRHITAMTVLLLVVLSEGAMAQVASDFIPPTLLEAEWFNTLQREIINVLLKAGMQPNKSNDAQLSEAIGKLVNQVNDNANSRVPATRKINDKSLVSDVTLSSQDIFSQVESLGNRIDLNTITVPGIYAQYSSEQAYNGKNYPSTVAGTLIVYRSAGIFQEYTEYSTGVSYRRTFHPSENNWSAWSEVLTTTSAYIYNTFLEKTKNGADILDKNAFINNLALRDTVNQAKRSVPDNRKINGKSLARDIVLSSQDIFNQVESLGERIDLNTITTPGIYVQFSSTEAHRGKNYPSTLAGTLVVYRSVGVIQEYLEYGTGVKYRRAYHPSENSWSNWDEILTVASSKIKQTRQGGIAAFTLNGMLIQTGVVMAPTGSTTRYSLPVAFKSFGHVVGGVGASSGPGVNAGVSLVGLNQIEVSRTVNADPIRFIAVGDY

SEQ ID NO: 7450 - protein, 134 aa, Xenorhabdus sp.
MHDPEVLNNLMAAMIKHENDNINPYSYEQIKVGINDAIHSDRWRGLRKPEIIREQRLQHPRNKRESQPEPSLYGNKKEPESQMDIVQGMAKAFQEAIAGKPFQFEVILINDKTGERQKFQSNSAGKVTTSMRQP

SEQ ID NO: 7451 - protein, 205 aa, Xenorhabdus sp.
RVAGTMRDWKNNMLLTSVGQWDKPKAAAQDKNPVHGFLSGAATFVNPFGFNNGGDQLALLKKAKKDDEFRKTLSFKEKTDLLLEYASEDLINKLNAYYFPNKKPSHVGEKVPDIPVVRGSNYANPLKESGRQPRGIRNNNPGNLTAAPHAVGKEYDNNHTYVKFDTAHDGLSAMARQLMLDAERGLNTIDLFLDKYASRKGRKQY

SEQ ID NO: 7452 - protein, 260 aa, Xenorhabdus sp.
MDKLFWQTLGEAPRDLVMLHGWGLNAEVWRSVETRLASHFRLHLVDLPGYGRSQPYPAMTLKEMADTVWQQAPENALWLGWSLGGLIASQIALDHPDKVAGLITVASSPKFSEEGDWPGIQPSVLSAFKHQLSEDFQKTVERFLALQTLGTNSARQDARLLKSVVLSLPMPTVEVLNAGLEILRTDDLRSELAQLQLPFLRIYGYLDGLVPRKIAALLDSEWPHTRSVIMRHAAHAPFISHPDEFVDLLIAFADSGSDAE

SEQ ID NO: 7453 - protein, 336 aa, Xenorhabdus sp.
MKKFRLSLHHKFSRALVWALAMPLSSLMISYLSATMLARREDISFITVFPYILISTLLSVLFVAAMCCLYLRAQRRPLAAIQQAIIRTGKGKIITPLPESGTSGTRSVIRAFNQMSVALKSLEDDRAIFIAGLSHDLRTPLTRIRLAMELIGGENDFLCESVNQDIEECNAIISQFIDYQRAGQDTAKIRCELNQLIKEVMRAEKAEIADNLSVIPVFIMADPLSVKRVLANMLTNAQRYGNGWIGISTGKTEKFGWFQVEDNGAGITKEDIDILFQPFRQGKAHSMNNRHNHRGVGLGLAIIRRIIDMHDGYLDVGRSEKGGLSIRAYIPLAADS

SEQ ID NO: 7454 - protein, 346 aa, Xenorhabdus sp.
MKPVRLTVVGMMAVASAMVSVSSFSATSLTGAGATFPAPIYTQWADSYQKETGNKINYQGIGSSGGVKQIIAGTVDFGASDAPLTDEKLASEGLFQFPTVIGGIVLAVNLPNIKSGQLVLDGKTLGDIYLGTIKKWNDPAIAKLNPNLKLPEQDIAVIRRADGSGTSFVFTSYLSKVNSDWKVKVGSGSTVKWPTGLGGKGNDGIAAFVQRLPGSIGYVEYAYAKQNNLAYTGLITADGKTVVPTEANFSAAAKGADWSKSFAQDLTNQPGENAWPITSTTFILIHKQQKNGANGAEVLKFFDWAYEKGGRQAKELDYAVLPQDVIKQVRAAWKSNIKDEHGNALY

SEQ ID NO: 7455 - protein, 336 aa, Xenorhabdus sp.
VSECSQQRGNLKDEGYQMGIERMAEHKAPGRYGDIIFSALVRLSALMTLFLLGGIIISLFVASWPSMQQFGMAFLWQKDWDAPAEIFGALVPIYGTLVTSLIALIIAVPVSFGIALFLTELAPNWLKRPLGVAIELLAAIPSIVYGMWGLFVFAPLFATYFQQPVGEVLSGIPIVGKLFSGPAFGIGILAAGIILAIMIIPYIASVMRDVFEQTPVMMKESAYGVGCTTWEVIWHIVLPYTKNGVIGGVMLGLGRALGETMAVTFIIGNTYQLDSFSLYMPGNSITSALANEFAEAESGLHTSALMELGLILFVITFIVLALSKLMIMRLARNEGR

SEQ ID NO: 7456 - protein, 304 aa, Xenorhabdus sp.
MAITDKRKNGSAGSESHTSRNRRQVWRRQKNRLALFLSMATMAFGLFWLVWILISTITKGIDGMSVALFTEMTPPPNSEGGGLANAIVGSGLLIFWATVFGTPLGIMAGIYLAEYGRRSLLAEMVRFINDILLSAPSIVVGLFVYTIVVMKMQHFSGWAGIIALALLQIPIVIRTTENMLKLVPNNLREAAYALGTPKWKMITAITLKASISGIITGVLLAIARIAGETAPLLFTSLSNQFWSTDLSQPIANLPVTIFKFAMSPFSDWQQLAWAGVLLITLCVLLINILARVLFAKKKFADKKF

SEQ ID NO: 7457 - protein, 259 aa, Xenorhabdus sp.
MNKVNNDVAGSKIQVRDLNFYYGKFHALKNVTLDIAQNKVTAFIGPSGCGKSTLLRTFNKMYELYGEQRAEGEILLDGTNILADKQDIALLRAKVGMVFQKPTPFPMSIYDNIAFGIRLFEKLPRAEMDERVRWALTKAALWNETKDKLHQSGYSLSGGQQQRLCIARGIAIRPEVLLLDEPCSALDPISTGRIEELISELKAEYTVVIVTHNMQQAARCSDYTAFMYLGELIEFSDTDILFTTPKMKQTEDYITGRYG

SEQ ID NO: 7458 - protein, 238 aa, Xenorhabdus sp.
MDNLNFGRHISGQFNAELEHIRTELMAMGGLVEEQLSKAILAMHNQDRELAQQVIEDDEKVNMMEVAIDEACVRIIAKRQPTASDLRLIMVISKTIAELERIGDGANKICQTALERFSQQHQPLLVSLESLGWHTIRMLHDVLDAFARMDLAEAIRIYREDKKVDQEYEGIVRQLMTYMMEDPRTIPSIMTALFCARSIERIGDRCQNICEFIFYYVKGQDFRHIGGDKLEELLTKGE

SEQ ID NO: 7459 - protein, 167 aa, Xenorhabdus sp.
VNFSIPYFATGQKFIARKGVLTNPDDIAKLRIGADKGTVQEITLRERYPTTKVISYDDTPLAFAALRNGNVQAITQDDAKLVGLLANVPEAQKADFEISPFSITREYQAVAASKGEARLVDSVNQTLLKLEKEGEAEKIYNRWFGPETKSAQPRGDFRFAPLNNQAE

SEQ ID NO: 7460 - protein, 245 aa, Xenorhabdus sp.
MFEQFIGEHLLAPEYLQWLWQGFLITLWISACTIASSSLLGFVIAAARDSQIKPLRWLVTAYTSVFRNTPLLVQLFFWYFASGQILPQAAMIWLNTSHEITLAGLTLEWPSFEFLAGFIGLTLYSAPFVAEELRAGMQGIGRGQKYAAQALGLTGWQAMRYVVLPQALKIAMPPLLGQYMTIVKNSSLTMAIGVAELSYASRQVETQSLKTFEAFGVATVLYIAIIAVMEGWGQWRQQRILARGH

SEQ ID NO: 7461 - protein, 49 aa, Xenorhabdus sp.
VVELWLEDEKQLSAVQQELNQFSRDPLNERYQAASWQAGKTSTAVEIRK

SEQ ID NO: 7462 - protein, 107 aa, Xenorhabdus sp.
MEHFQTISPEQAYQNWLDKSALMVDIRDPQSFRAGHVTGAFHLTNETINQLLQETDFDQPVMVMCYHGHSSQGAAQYLINIGFETVYSVNGGFEVWKKDYPHAVHAE

SEQ ID NO: 7463 - protein, 191 aa, Xenorhabdus sp.
MINITEAAQAHFAKLLANQEPGTQIRVFVINPGTPTAECGVSYCPPDAVEATDTELKFDQLSAYVDEISAHFLEEAVIDFVTDQLGSQLTLKAPNAKMRKVADDAPLIERVEYTLQSQINPQLAGHGGRVSLMEITDEGYAILQFGGGCNGCSMVDVTLKEGIEKQLLQMFPELKGVKDLTEHQRGEHSYY

SEQ ID NO: 7464 - protein, 227 aa, Xenorhabdus sp.
MLTMVGYCWLCHQSLYFAHHGICHICWQNLKRLANVCPCCSLPASSRDLPCGRCLKEPPLWQQMIAVTDYAPPLSQLIRRYKYHSTPQLAAVLARIFLLHWLQGYREGRWMKPDCILGIPLHRQKRWQRGFDQVEVIIRPLARWLRCQHQPNLLQRTRATLTQRGLSAAQRKTNLKHAFQLRGDFTDQHVVIFDDVITTGTTLHEATQLLIRAGARSVQTWAICRTL

SEQ ID NO: 7465 - protein, 119 aa, Xenorhabdus sp.
VDEPKNLGGTDEAMNPVEALLSAFGACQCIVAKSFARKHKINLIDIQVNVEGELDTDGFTGKNKNAKIGFSKITSKFHIKADNTEQEIRDFIQFVESNCPVLDTIVNTPEIVTEVYPVR

SEQ ID NO: 7466 - protein, 770 aa, Xenorhabdus sp.
MMKQLTIGLIGNPNSGKTTLFNQLTGSRQRVGNWSGVTVERKTGHFSTQKHQIDLVDLPGTYSLTTISEQTSIDEQIACHYILSSEADMFINVVDASNLERNLYLSLQLIELGIPCIIALNMLDIAKSQHINIDIAALEQHLGCPVIPLVSTRSTGIDTLKKAIDHYHQPVRPVLVQYPDTLLQEANNLADLISRNFNLQQRRWLSLQILEGDIYSFERSGLTQAQLAESKLRLQQKQIEEPELIIADARYQAINKLCLAVTDVDSAIPNKLTQAIDKIILNRWLGVPVFLFVMYLMFVLAINIGGALQPIFDGASSAIFIDGMQWLGYTLHFPGWLTIFLAQGIGGGINTMLPLVPQIGMMYLFLSFLEDSGYMARAAFVMDRLMQSLGLPGKSFVPLIVGFGCNVPSVMGSRTLDAPRERLITIMMAPFMSCGARLAIFAVFAAAFFNKHGASIVFSLYILGIVVAILTGLLLKYTIMRGEASPFVMELPVYHVPHAKTLLIQTWQRLKGFVIRAGKVIVAASMLIGALNSFSFSGKTVDDINESALASVSKVITPILHPIGVHSDNWQATVGLITGAMAKEVVVGTLNTLYTAENITKQPFNPDEFNLLDELTGSVTETWDSLKETFTLSALSNPIEASKGDGNMDSSSMGVMSAKFGSPVAAYSYLIFVLLYVPCVSVMGAIARETSRGWMTFSILWGLNVAYSLAVLFYQAATFSAHPQSSMLTILAVILFNVAVFVGLRRARSRITITFNSTRDRSCDCSGSCH

SEQ ID NO: 7467 - protein, 174 aa, Xenorhabdus sp.
MNKYIQSSFDLLSNIRFFNLATHAPNAESAWSSTLFYIPKYNPLSLIWYSKQDTRHSQELLINPRVSGTIYSSITTPDSSLILAGSQFIGHARQVPDDELQETYDYFFLKTYPDENIRKKKSRPIADYHGNAIRRFYELKVEAWWVYDSTGWSERQDDARVSISLNDLLYPPKN

SEQ ID NO: 7468 - protein, 782 aa, Xenorhabdus sp.
MNESLSRIIAGELQAQPQQVLAAITLLDEGNTVPFVARYRKEATGGLDDTQLRQLESRLGYLRELSDRRQTILKSIEEQGKLTSELAEAINSTLSKTELEDLYLPYKPKRRTRGQIAIEAGLEPLADLLWQDPQQEPESAAAAYVNADNGVADTKSALDGARYILMERFSEDASLLVKVREYLWKNAHLTAKVVEGKEEEGAKFSDYFDHHEAISSVPSHRALAMFRGRNEGILQLSLNADPQFEEAPKESYCEQIITDHLNLRLNSAPADSWRKAVVNWTWRIKVLLHMETELMGTLREKAENEAINVFARNLNDLMMAAPAGMRSTMGLDPGLRTGVKVAVVDSTGKLLATDTIYPHTGQENKAAAAVAALCTRHNVELVAIGNGTASRETERFFANVQKQYPAVTAQKVIVSEAGASVYSASELAAQEFPDLDVSLRGAVSIARRLQDPLAELVKIEPKSIGVGQYQHDVSQTQLAKKLDTVVEDCVNSVGVDLNTASVSLLTRVAGLSRSVAQNIVTWRDENGRFNNREELLKVRRLGPKAFLQCAGFLRINQGDNPLDASTVHPESYPVVEKILATTEQTLPELMGNPAALRDLKAQDFTTEKFGIPTVTDILKELEKPGRDPRPEFKTATFADGVETMNDLRAGMILEGTVTNVTNFGAFVDIGVHQDGLVHISSLSDRFVEDPHTVVKTGDIVKVKVMDVDLNRKRIALTMRLDEQPGEAPARRNNAQGNNRQERNGNERNRNGKSRQNLRSSGSAQLTNSAMSDALAAAFGKKR

SEQ ID NO: 7469 - protein, 221 aa, Xenorhabdus sp.
MSTYAQARDYNDTDVVIDRIATVSDIIRKAFTSGQAHIDKRVLGKSDVEFMFEVLASTTKAMAIEEITPEKKTLLRRLKSKLIFMETLKKDGGVLSSAETAKQLGVSKVTVKNWKDAGKLLALNIDGEFYFPVFQFTDNSKMSNKGVLKGIGQLLPLLKERGFSDRLQYSFFMEKRNTALNGMFPEGKEFSVAQLLQEGASDAVMQELHHLVHLYGSQDAA

SEQ ID NO: 7470 - protein, 357 aa, Xenorhabdus sp.
MTTPHNYDQDDLSAFEAITEAQRIAFAPMLFQTAICLRDFGILSFLDKHHKEGATKDEICSGSKSDNYGVGVLLDMGLSGRIILKRDDRYFLSKVGHYLLHDKMTRVNMDFTQDICYQGLFHLKESLQENKPAGLKVFGEWSTIYPALSQLPEPAKTSWFSFDHFYSDSAFNAALKAIFSLNPKLIYDVGGNTGKWALRCCQYDSKVSVTILDLPQQIELAEKNILSQGMAERISGHPVDMLSDCKLPKDADIWWMSQFLDCFSETQIVDILRKIAASMKPDARVCIMELFWDCQPFEAAAYSLNATSLYFTCMANGNSRFYSMDNFNQFLDKAGFEVENKIDQLGLGHTLLVCKKK

SEQ ID NO: 7471 - protein, 191 aa, Xenorhabdus sp.
MTARRLNSGSRLAVDCGLSILRRNKVDAIVYTSRHGELERNYQILMNLAQTEPISPTNFAMSVHNSSVGNLTIVAKAPLVSSSVSAGIDSFQQGLFEVATLHHAGYSKVLLVDFDGKIPDFYHNEIDENTPIFPFAVAFLFEQGKSLHCEKHPSPETDPALPQSLQFLHGWLNGKQRFTVAGDHCAWHWSK

SEQ ID NO: 7472 - protein, 264 aa, Xenorhabdus sp.
MEEKIINRITEQANWLWRLLMTGFCFALFGIGGLLLSLIWFNLLLVFQRNAEKRLRIARRSISTCFRLFLFLTRKLGVLNYHFNGADKLRTDKGCLIVANHPTLLDYVILASNLPDVDCIVKSALLRNPFLSGVVRSARYLINSDAETLLLACRERLATGGNILIFPEGTRTTPGHPISLQRGAANIAVRCECDIRVVHITCSQKMLDKKSKWYQIPPKKPIYTITVGEQLANGDFSADIESGYAIAARQLNRQLTQLLTPSNY

SEQ ID NO: 7473 - protein, 94 aa, Xenorhabdus sp.
MQESNMQELNQNLQIEIKQLIIDTLNLEDITPADIETEAPLFGDGLGLDSIDALELGLAIKTRYGIVLSAESEDMRQHFSSVATLSSYIQSQQG

SEQ ID NO: 7474 - protein, 82 aa, Xenorhabdus sp.
MEKQKIYQEVSQLLVKLFELSPEDITPDSRLYEDLELDSIDAVDMVVHLQKKTGRKIKPEAFKSVRTVQDVVDAVEQLLQEE

SEQ ID NO: 7475 - protein, 33 aa, Xenorhabdus sp.
MTLWTLWNGMISYLLIGLLIVIEWLVRQRVKKR

SEQ ID NO: 7476 - protein, 261 aa, Xenorhabdus sp.
MSVALPFERKMVEFPEQLTQCPQASLTRYALISSPAFLQRLDDSLPAPNCSFVVSAGGPLNFADAERVTQWFKTIPNEIYGSTETGIIAWRARREDHSVWKTFADVSFRQDKENNLRVYSPLLSTTDGMVLDDRLLFDEKGNFSLQGRRDRLVKIEEKRISLSEIERRICAIDGVIDAAALIINRGKRNYIGAVLVLDDEAFQHYLQQGSGKCSQNWRRQLISWLEPVALPRYWRVTTAIPLNAQSKRSWPELQELFNETH

SEQ ID NO: 7477 - protein, 119 aa, Xenorhabdus sp.
MKPIETHLEQPAPNEAIIRLYLDPDLSWFRGHFSVQPLLPGVAQIDWVMHYAQALFAPGWHCSSVEMVKFQLPLQPEDNLRLKIHWEETKHQLTFQYDVESPDSGECKTASQGKIKLCR

SEQ ID NO: 7478 - protein, 393 aa, Xenorhabdus sp.
MDFDIEIMVRLYWQGTESEFVPTKVTYPENGLSHFHALHDNLSISWMHTRLFFAMLPRLPALLWRKRSLLSRWWGNRRHWSDIKERKGLYGMKFMLAVYRRLGRKPFEWLLYPVVGYFWATGGVQRQASQQYLNRLKQTMQRKNIAIPSGLNSYRHYLRFGGAMLDKIASWRGDLKWGKDIEFADGAEAILLGGDSRGKLLLVSHLGDIEVCRALAQHAGQRTINALVFTEHAQRFKQIIEEVSPQAGINLLPVTDVGADTAILLKEKIDAGEWVAIVGDRIAVNPSRISTHRVVWSQFLGDSAPFPQGPFILASVLRCPVLLMFALKQNHRFRIYCEPFADPLELPRKQREQALQQAVDHYASRLEHYALLSPLDWFNFFDFWQLPTNKAKE

SEQ ID NO: 7479 - protein, 118 aa, Xenorhabdus sp.
MGVVWHGNYFRYFEIAREALMEQLNYGYREMIASGYVWPVVDAKIKYRRPIEFGQKIRVQATIKEFENRLKLVYQIFDSESGNKTTTGYTIQVAVAEKTQEMSFVSPDILFERMGVKP

SEQ ID NO: 7480 - protein, 82 aa, Xenorhabdus sp.
VLDDNRMVQAIAGQAPQVITADSNPQMFQFNHLMRALFQADRAVLEENFKIEFKELKQETWQLELTPKTSPLDKLFTIITFR

SEQ ID NO: 7481 - protein, 180 aa, Xenorhabdus sp.
MLVGSVIFIAMAKTYPVLSSQILDLYRQYRLHYLINRVAHMMEKDLRRAGYCLDRKQCKGEPLVIQNKQAESTNSCFISAFDLNLNNRWEEPEHAASEFFGYRLNNRILEWKRGAVSCQDNGWERLFDPKEVNIDKFHLEQSRSLHGVIFITLSIKASWVKSPSIIHHHRTTIRLRNIRK

SEQ ID NO: 7482 - protein, 184 aa, Xenorhabdus sp.
MKVPSSSEKIRLQHGEYGGSCVFFNPNGTDTRFGLTDGINGTMYLASDPLTAMKEVFQGKLGIRESDLENFYIGIVVIEKDLRLFDTTKLIKKTSLTLNDMTTSSRKTTQLLAKKVHVAGLNGIKFPSNVTTEECFALWHDVPDGTGIAVTKAHSIQRLSEFEYQGKSVADILVEQLGIPVEEG

SEQ ID NO: 7483 - protein, 264 aa, Xenorhabdus sp.
MKQYLDLMKKVLEEGTAKDDRTGTGTLSIFGHQMRFNLQEGFPLVTTKRCHLRSIIHELLWFLNGDTNIKYLHDNGVSIWDEWADENGDLGPVYGKQWRSWGAPDGRQIDQLTNVIEQLKSDPDSRRIIVSAWNVGELDKMALAPCHAFFQFYVADGKLSCQLYQRSCDVFLGLPFNIASYALLVHMMAQQCDLEVGDFVWTGGDTHLYNNHMEQTKLQLSREPRALPKLVIKRKPASLFDYRFEDFEIEGYDPHPGIKAPVAI

SEQ ID NO: 7484 - protein, 305 aa, Xenorhabdus sp.
MSTSYLAFPNIDPVIFSIGPVSLHWYGFMYLVGFVFAMWLANRRAAKPNSGWEKNEVENLLYAGFVGVFLGGRLGYVLFYNLPVFMENPLYLFKVWDGGMSFHGGLIGVICAMWWFSRRTKRHFLQTADFVAPLVPFGLGMGRIGNFINGELWGRVTLDTPWAMLFPGSQSEDIALATKDPSLWPILEKYGVLPRHPSQLYEMVLEGIVLFIILNLFIRKSRPMGSVSGLFLIGYGAFRIIVEFFRQPDAQLGLFDGISMGQILSIPMILVGILMMIWAYKRPSNNNTGNNTRKNTQKDKVQEAK

SEQ ID NO: 7485 - protein, 424 aa, Xenorhabdus sp.
LVADELSANLLAEIPQDKLVGVIVRDGATHSHSAILVRAMGIPAIMGADIHPELLHNRMLILDGYRGEFFIDPEPLVVQEYRQIIEEEQVLSKLAEGGQQQKARLKSGERVRVQLNAGLSLKYEQQIGDSIDGVGLYRTEIPFMLHSGFPSEDEQRNRYQEMLTLFPDKSVVLRTLDIGADKHLPYMPIHEENPCLGWRGIRITLDQPEIFLIQLRAMLKANISTGNLKILLPMVSCIEEIDEAKKLINRAKTEAEQSAGTTIAMPQIGVMVEVPSLILLLPQLKKRVDFISIGTNDLTQYLLAVDRNNTHVASLYDNLHPAMIKALKQIVDESQRIGLPVSVCGEMAGLPMGVLILVGLGYRCLSMSGRSIPRIKYLLHHLDSAELSYFIQEILRAETTQQVKEICSAFMETHGLGGLVRGGI

SEQ ID NO: 7486 - protein, 75 aa, Xenorhabdus sp.
MTVKVNGETAIIVVSLSLSEPVIIREDKNGIVPFDGKRWLLTTSEIWFAENGVVHTPTLSDGHVFKALITLKHCL

SEQ ID NO: 7487 - protein, 1186 aa, Xenorhabdus sp.
VAVYSDADKNSQHVKDADIALPINGEKASESYLCIDKIISAAQQSHAEAIWPGYGFLSECLLFAQACEKAGIVFVGPTSHQIGEFGLKHRARELAAEAGVPMTPGTGLLNSLDEALSAAETIGYPVMLKSTAGGGGIGLSCCYDANALSEAWESVRHLGEQFFSDTGVFLERCIRQARHLEVQIFGDGKGNVVALEERDCSLQRRNQKVVEEAPAPNLPEQTRTALLDSAVQLGQLVKYRSAGTVEYIYDVEQDEFYFLEVNTRLQVEHPVTECVTGLDLVEYMLRVAAGLPIDWEDLKRAPVGAAIEVRLYAENPLKNFQPAPGVLTEVKFSEGIRIDSGVSTGSEVSAFYDPMIAKMIVHAENREKALIKLREALDSCQLHGITTNLEYLRQITASEPFQKGQVWTRMLDSFEPQASVIEVLKAGTWSSVQDYPGRSGYWDIGVPPSGPMDDLAFRLANRIVGNHESAAGLEFTLEGPTLQFHCDALIALTGAESSALLDGTSVPYWQPLNIKAGQILEIGRAQSGCRTYLAVRNGIDVPCYLGSRSTFALGQFGGHAGRILKIADMLPISQPALPACTTPAPISLPKAPEPASIPVYGDIWDIGVLYGPHGAPDFFAQDYIDEFFSAEWQVHYNSNRLGVRLIGPKPVWARPDGGEAGLHPSNIHDCEYAIGSINFTGDFPVILTRDGPSLGGFVCPVTIAKAELWKVGQVKPGDRIRFHPVSMEEAITLEEQQNRIIATLRSTSEAPLKLERTLQIEEEHSGAVLAAVSATHSAPAVVYRQAGDNYILIEYGENILDLALRLRVHLLMEKLHVLAEPGIKEIAPGVRSLQIRYDNRQIEQQKLIALLLSLEKQLGNVSTMKVPSRIIHLPMAFEDSATLGAVDRYQSTVRSSAPWLPNNVDFIQRINGLADREAVRRILFDASYLILGLGDVYLGAPCAVPIDPRHRLLSSKYNPARTFTAEGTVGIGGSYMCIYGMDSPGGYQLVGRTLPIWNKFLKNEQFEEDKPWLLRFFDQIRFYPVTEAELEQLREDFQEGRTAIHIENTQFDFAEHLHFLKENAEDIAYFKLRQAVAFETEVMRWQQEQPEEERSVQDGEEQPQEEADLNEHGLQISADMSGNIWKVLVKSGDDVEEGQPLIIVEAMKMELAIHAPQAGRVTKISCQPGSAISPGDALLWLGAGDS

SEQ ID NO: 7488 - protein, 479 aa, Xenorhabdus sp.
MDQFATGLVGTRSPYGVVKNSFNDRYISGGSSSGSASVVARGLVPFALGTDTAGSGRVPAGFNNIVGLKPTKGWLSAKGVVPACRLNDTLSVFALTVEDAFSVADIAGGFDENDAYSCINPASTPATLPDHPLFAIPANPVFCHDTIAESAWQEALHELQNMGATLQPIDFLVFNQLGEQLYQGAWVAERTTVVNGMLSFPAMMDPEVRQIIDSGKNYSAVDAFNAEYLRAELARKIQHILAGFDALIVPTTPTIRTIEEIKRTPIHYNSELGIYTNFTNLANLSALALPAPFRTDGLPAGITLLAPAWHDRALASFGLRWQQHLALPLGATGQLLDGEAMVLPPSGQHIRLAVVGAHLRGMPLNDQLTERNAVFVETTQTASCYRLYELANTQPPKPGLVRDDTGASISIELWDIPLAYFGAFVAEIPPPLGIGSLELADGRWVKGFICEPVALKGATDITEFGGWRNWVINQEKDNV

SEQ ID NO: 7489 - protein, 331 aa, Xenorhabdus sp.
MAIVPPIPRNERRQMRKIVQKTADKNYARRIMAILLLHQGASVSQVAKTLCTVHSSVWRWIDRFKALGWAGLYPLSAGRHPRWNLTPLLPVLFYLLEHSPQQFGHIRSRWSLSFFIFQIKKLFNIKLSISTLYRFFCKNRIVWRRAAPTLQVPDPEYDEKMRLITKALSLASEKHPVVYEDEVDIHFNPKIGADWYFKGQQKRIITPGQNQKYYIAGTLDVQTKHVLYTGSSKKNSLLFIKMLEVLKRYYQGVKTLTVILDNYCIHKSRAVQRWLAQNPTIILLFLPVYSPWLNKIEYLWHTLHETVTRNHCCRYMWQLLSNVKKFLKKSA

SEQ ID NO: 7490 - protein, 474 aa, Xenorhabdus sp.
MSLSRRQFIQASGLAVCLGALPFAVQADKDQQIVLPVPPLLESRGGQPLFLALQRASWSFDGKNKASVSGINGLYLGPTIRVRKGDNVKLIYSNRLSEPVSMTVSGLQVPGTLMGGESRLIPAHGNWSPVIPIDQPAATCWYHANTPHRMAEQVYAGLAGMWLVEDENTHRLPLPRHYGVDDFPVILQDKRLDNFGTPRYDKASASQGFLGDTLVINGVENPFIEVAKGWIRLRLLNAANARRFQLQLSDGRPFYMIATDQGLLPAPVAVQTLSLAPGERREVLIDMSKADSVVITAGESAGMIDRLKGLFEPSSKLRSTNVLTIKSGGLLPLVTEELPSQLVTDTTGIDSSIRNRQIVLGDETQGINGALLNPNRTDMTSHQGAWERWIVTTSIPQPFHIEGARFKVIKHNGVQPEPQDYGWKDTVWVDGRTELLVNMMQPSYEHYPFMYYSQILEWADRGVAGQLVVTPAGM

SEQ ID NO: 7491 - protein, 243 aa, Xenorhabdus sp.
MLTIIRGIIVILFTFLVCIFGGIYCLFSPRDPRHVMTFGRAFGKLHTIFGIKLIERIPEDAPQVGPSIYIGNHQNNFDMITMSNAVQPRTVTVGKKSLVFIPFFGQLYWLTGNILIDRQNRTKAHGTISQVVKQIKKNNVSVWMFPEGTRSRGRGLMPFKTGAFHAAIAAGVPIVPVCVSSTHGKIKLNRWNNGTVIVEMLPPIDTTKYTKERVRELAEHCHQVMKTKIEALDKEVEELNKRS

SEQ ID NO: 7492 - protein, 750 aa, Xenorhabdus sp.
MSEITHDGVERQPLHTFTENAYLNYSMYVIMDRALPFIGDGLKPVQRRIVYAMSELGLSSSAKFKKSARTVGDVLGKYHPHGDGACYEAMVLMAQPFSYRYPLVDGQGNWGAPDDPKSFAAMRYTESRLSKYAELLLSELGHGTVDWVPNFDGTLQEPKMLPARLPNILLNGTTGIAVGMATDIPPHNSREVANALISMLDKPESSLDEVMEHVKGPDYPTDAEIITSKEDIRKIYKNGRGSIRMRAVWSKEEGNVVITALPHQVSGAKVLEQIASQMRSKKLPMVDDLRDESDHENPTRLVIVPRTNRVDVEQVMNHLFVTTDLEKSYRVNLNMIGLDNRPSVKGLVEILSEWLVFRRETVRNRLNHRLEKVLKRLHILEGLLAAYLNIDEVIHLIRSEDEPKPVLMQRFGLTETQAEAILELKLRHLAKLEEVKIRGEQDELAKERDKLQAILGSERKLNTLLKKEIIADAENYGDKRRSPLKERSEAKAMSDHDILPSEPITVVMSQMGWVRSAKGHEIDPTGLNYKSGDSYRDAVRGKSNQPVVFIDSTGRSYSIDPLDLPSARGQGEPLTGKLALPAGASVEHLLMAKEDQKLLMASDAGYGFICTFSDLIAKNRAGKALITLPQNAKVMSPLEIGNEQDDMLLAITKAGRMLMFPVADLPQLSKGKGNKIVSITSAQAASGEDILSWLLVLPPKSSITLYFGKRKLQLQPEELQKFRAERGRKGTALPRGLQRVERVEIETKLN

SEQ ID NO: 7493 - protein, 631 aa, Xenorhabdus sp.
MTQSSYNAEAIEVLSGLEPVRRRPGMYTDTARPNHLAQEVIDNSVDEALAGHAKHIQVILHSDQSLEVIDDGRGMPVDIHPEEKVSAVELILTRLHAGGKFSNKNYQFSGGLHGVGISVVNALSKRVEVTVRRDSQVHQIAFENGDKVQELAVIGSCGKRNTGTSVHFWPDESYFDTPRFSTSRLAHLLKAKAVLCPGVEIIFKDKLAGTEQKWCYADGLTDYLLEAVNGLVTLPQAPFVGALSGETEAVDWALLWLPEGGELLAESYVNLIPTIQGGTHVNGLRQGLLDAMREFCEFRNILPRGVKLSADDIWDRCAYVLSLKMQDPQFAGQTKERLSSRQSAAFVSGVVKDAFSLWLNQHIQEAEQLAEMAIASAQRRMRAAKKVVRKKLTNGPALPGKLADCTSQDLNVTELFLVEGDSAGGSAKQARYREFQAIMPLRGKILNTWEVSSDEVLASQEVHDISVAIGIDPDSEDLSQLRYGKICILADADSDGLHIATLLCALFVRHFPTLVKRGHVYMAMPPLYRIDLGKEVHYALDEGEKSAVLDRLSRKRGKPNVQRFKGLGEMNPMQLRETTLDPNTRRLVQLTINDENYQETLSVMDMLLAKKRSEDRRNWLQEKGDSIDIEV

SEQ ID NO: 7494 - protein, 168 aa, Xenorhabdus sp.
MLVPQLPPYPEDTAALLEEIVMSRSGEHIGLVGSSLGGYLAIWLSQCFGLPAVVVNPAVRPFDLLQDYLGENVNPYTEERYTLEESHIHDLKVMHIDPLESPDLIWLLQQTGDEVLDYRQAVAYLMQCRQTVESGGNHAFIGFEYYFPQIIDFLGLASGNSKKIAKNR

SEQ ID NO: 7495 - protein, 279 aa, Xenorhabdus sp.
LESLLEIPVAKGATARILQITDMHLFANKGGSLLGINTYRSYHAVLDAILEQNIDIDLVVATGDLVQDQTPGAYQNFVEGIARLPAPCVWLPGNHDYQPAMVDVLAAAEISPSKQIFIGQHWQLIMLDSQVQGVPHGELTEYQLEWMSKCLDEHSDRQAIVMLHHHPVPSGCTWLDQHSLRNAPALAECLKDKSQVKTILCGHIHQELDVIWNGIRVIATPSTCVQFKPHCTNFMLDTVAPGWRYLELPVTGGGEAELQTQLYRLKSNEFCPDLDSDGY

SEQ ID NO: 7496 - protein, 204 aa, Xenorhabdus sp.
PFTFSKQDVEVISRKTLYHGFFKMTEYQFKHRLFRGGWSENIKREVFERGHAGVLLPYDPVRDEVVLIEQIRIPAIETSQTPWLLEVIAGMIEEGEDAEQVVRREAIEEAGIEVKRCQPALSYLASPGGTTERMSIFVGEVNSSTASGIHGLEGENEDIRVLVVSREQAYQWVEEGIIDNSASVIAIQWLALHHAKLKKEWLEI

SEQ ID NO: 7497 - protein, 258 aa, Xenorhabdus sp.
MSLLRMPALFIGHGSPMNAIEDNCYSRAWFELGQKLPRPRAILVISAHWYIDGTAVTAMPQPRTIHDFGNFPRELHEKQYPAKGYPELAVLVQDILEPIEVETDFDEWGLDHGSWGILAKMYPDADIPVIQLSIDRNQSTAFYYDIGRKLSMLRDEGVMIIGSGNVVHNLPAEELGAEPYPWALSFEQFVRENLTNTEEPHPLLQALDREDGKLSHPTPEHFMPLFYVMGTWDKEEPISTPVEGIEDGSLSMLTIQLG

SEQ ID NO: 7498 - protein, 217 aa, Xenorhabdus sp.
MNQTLLSSYGTPFQRVERAIAALRAGGGVMVLDDENRENEGDMIFAAETMTVEQMALTIRYGSGIVCLCMTDERRRQLQLPMMVENNSSQYQTAFTITIEAAQGVTTGVSAADRITTIRAAIVDGAQPDDLNRPGHVFPLRAQNGGVLTRRGHTEATIDLVKLAGFKPAGVLCELTNDDGSMARAPEVIEFAQQHEMPVVTIEDLGDYRIKMEKAVS

SEQ ID NO: 7499 - protein, 474 aa, Xenorhabdus sp.
MNVALPDFHRAGVLVVGDVMLDRYWYGPTSRISPEAPVPVVKVDTIEERPGGAANVAMNIASLGANSHLVGLTGIDDAARALSEKLSSVKVRCDFVSVSTHPTITKLRILSRNQQLIRLDFEEGFQNVDAQPMLEKIQQSLPNIGALVLSDYAKGALSQVQAMIKLANDAGVPVLIDPKGHDFERYRGATLLTPNMSEFEAVVGHCKDDDELVRKGTKLVQDLELKALLITRSERGMSLLRVGQPPLHLPTQAQEVFDVTGAGDTVIGVLATAIAAGKPLAEACYLANAAAGVVVGKLGTSTVSPVELENAVRGRAETGFGVMNESRLKEVVEQARQRGERIVMTNGCFDILHAGHVSYLSNARKLGDRLIVAVNSDASTRRLKGETRPVNPLEQRMIVLSALESVDWVVAFEEDTPQRLIAGILPDILVKGGDYKPEEIAGSEEVWAAGGEVQVLNFEDGISTTNIIKAIKSQ

SEQ ID NO: 7500 - protein, 957 aa, Xenorhabdus sp.
MLPLSSVLTHQLKHTVMHFQLSFRQSEAIADNFAPHEQAVLAISDFVAENLLTRAEWLDEIRQDPPQPDEWKYYSTWLAEWLNQALSSANDENILMRALRLFRNRMLVRIAWSQALRSSTTEQTLQQLSVLAETLIIAARDWLYRHCCQSWGTPTDQAGVAQPLLILGMGKLGGGELNFSSDIDLIFAYPENGVTRGGRREMDNAQFFTRLGQKLIKVLDQQTIDGFVYRVDMRLRPFGDSGPLVFSFPALEDYYQEQGRDWERYALIKARILGHDDQAYCNELRQMLRPFIYRRYIDFSVIQSLRNMKNMIEREVRRRGLKDNIKLGAGGIREIEFITQVFQLIRGGREPILQSRSLLRALEAIETLALLTQEQVRQLKESYLFLRRLENLLQSIRDQQTQTLPENELDRARLCWGMGFSDWDHLTAETEKNMLVVRDIFQQLIGDETEGNGEVSAHVPFKSLWLEYLNRDELMALVPHLSEPEAQKMLETMVSLRNDISKRTIGPRGRDVLDHLMPRLLAKIVAREDTNTVLERVIPLLLSIVSRTTYLELILESEQVMTHVIRLCAASPMIACQLSHHPLLLDELLDPTSLYKPLPLEAYRDELYQYLLRIPEDDEEQLLEALRQFKQAQLFRIAAEDIAGALSVMKVSDHLTYLAEAIIGAVVHLAWNQMVKRFGTPTHLSQRQGLGFAILGYGKLGGWELGYGSDLDLVFLLDCPIGVMTDGDRSIDARQFYLRLAQRILHLFSTRTASGVLYEVDARLRPSGESGMLVSTLETFDEYQKKEAWTWEHQALIRARMVFGDEKMRGDFERIRRETLCMPREPELLRQQVREMREKMYRHLGSHQHGQFDIKADPGGITDIEFIAQYQVLRYAPENAKLTRWSDNVRIFELMAEYNIMDEEEASALTQAYITLRNELHQLALQALSSHVPAERFIQQKALVHNSWQKWLGDKAQ

SEQ ID NO: 7501 - protein, 319 aa, Xenorhabdus sp.
MRSVEVELKLSVKPETISTVRDRLFQLPNHYTSPQHLTNIYFETPDNQLRRWDMGLRIRGFDQQYEMTIKTAGRVIGGLHQRPEFNVPLHQPKLDLTLFPADIWPENTDITQLQAALSDLFSTDFSREKWLVNYGQSEIEVVLDQGEIRAGEKTSPICEFELELKTGQVSDVLSLAEELAVQGGLRLANSSKAARGYALVREASSINLVSMEEEISETPEWQQPLSVLLTDILQQWQEQEEGWLAGINAGKVGLEKVLKRAGLLVEKQGGTAPALGLLSELEESLSTADAEAGAENVCYSAKWLQCKLALTQWLMTQLP

SEQ ID NO: 7502 - protein, 395 aa, Xenorhabdus sp.
VLGISGGIAAYKTAELVRRLRDRGAQVRVVMTPAAEAFITPLTLQAVSGHPVSDDLLDPAAEAAMGHIELAKWADLIILAPATADLLARLSAGMANDLVTTICLASAAPLAVVPAMNQQMYRAQATQHNLNILRERNVLIWGPDEGSQACGDVGPGRMIEPTEIVERATQHLNPVRDLVGLQITITAGPTREALDPVRFITNHSSGKMGFSIAQAAAKRGAEVTLITGPVNLPTPLNVKRIDVTSALEMHKQVQETAASQHIFIGCAAVSDYRFKQTATEKLKKQGDEITYTLVKNPDIVASVAAMEKHRPFVVGFAAETRNVEEYARGKLRQKNLDLICANDVSLAEHGFNSDTNALQLFWHDGSINLPHCDKLQLSHRLLDEIFKRYDEKNRR

SEQ ID NO: 7503 - protein, 152 aa, Xenorhabdus sp.
MMKKIDVKILDPRIGQEFPLPTYATPGSAGLDLRACLDNAVELAPGQTELLPTGLAIHIADEQLAAVILPRSGLGHKHGVVLGNLVGLIDSDYQGQLMVSVWNRGDKTFVIEPGERIAQMVIVPVVQAEFNLVEDFESSERGSGGFGHSGRQ

SEQ ID NO: 7504 - protein, 207 aa, Xenorhabdus sp.
VLAGVLPDMAEIERTKKKNRREEILQALAHMLESSDGSQRITTAKLAANVGVSEAALYRHFPSKTRMFDSLIEFIEDSLISRINLILQDEKETIPRLRLILMLILGFAEKNPGLTRIMTGHALMFEQDKLQSRINQLFERIEVQLRQILKEKKIRDGQGFSYDETVLASQLLAFCEGMLSRFVRSEFRYRPTKEFEVRWPLILTQLQ

SEQ ID NO: 7505 - protein, 287 aa, Xenorhabdus sp.
MIRSMTAFARRDIKGDWGNAAWELRSVNQRYLETYIRLPEQFRSLEPVIRERIRSRLTRGKVECNLRFELDTRTQGTLILNEKLAKQLVEAAGWIKQQSNEGEINPVDILRWPGVMSAEEQDLDAISAQLLAELDLALDAFIQSRETEGQALKALIEKRLDAVTVEVGKVREQMPAILQWQRERLQTKLEEAQIQLENNRLEQELILLAQRIDVAEELDRLDAHIKETRNILKKKEAVGRRLDFMMQEFNRESNTLASKSINSDVTNSAIELKVLIEQMREQIQNIE

SEQ ID NO: 7506 - protein, 274 aa, Xenorhabdus sp.
MAIANLEAELGFALFDRKSREPVPTEKAKTLAPYAREIVDNLRQLNVFSHELTQGVGSTLTIGISTGVNPQKLFLALHTINQRYPLMNIEIITAPQDDILPLLHQNRIQLALVFGGLHVNPQEQIYCIGHESFIATISSSHPSLSHQTSLYIEDLVQTRQIIIASHHREPSDLRTQVATKYWRTDNFSMALGLVEAGMGWGNLPYSLIKEKLIDGSLKQLEFRNTKNGLVLPIHVVSLKGNALKRGAQECVELLQRNLQPHHDEQINAAPITIR

SEQ ID NO: 7507 - protein, 152 aa, Xenorhabdus sp.
MALLRALGLPCRLHGFTIDKSLQYGIMQGKIYEMAPQEIYHTWVEVYINGQWLNFEGIILDKGYLTSLQKKYATHKGNFVGYGVAIDDLANAPVEWHGDNSTYIQQAGIVQDLGLFDSPDDFFSKYEQKMTSQEKEIFANKIRHELNYHLLK

SEQ ID NO: 7508 - protein, 218 aa, Xenorhabdus sp.
MSSIDLENSTISVQSVSERLLMLLKTQGAMQAADAGKLLGTTGEAARQQFVKLAKEGLVEGCSETRGVGRPIQLWHLTDKGNAKFPDTHADLTVQMITIIREQLGESALDVVIQSREQEISEKYKTALKGAADLQEKIERLVKIRCQEGYMAQYFIQEDGTILFVENHCPICAAASICQSFCRTELKMFRDILQAQVERTEYILNDDRRCAYRITPLR

SEQ ID NO: 7509 - protein, 647 aa, Xenorhabdus sp.
MMDDIRSAVKDWLDVAIAELELVAIHSPKGTKEQFEQAVGLVLEYCKENFELNHKNVLLCISILKRYQFHIRTDLAQLMEKSEYPDEANVTPFPQKPQKIRQLINEFNLKSSIEFIEVFESGFSVAPPEVLPYILTEVVQYPWGIDALLLLTQYFEESIALASAEMLDQYPSSAWKNLSYLQLVNLCAHFNRHPSVKSYMKRWKKRAMAHHKARAAAEIYEIYASEVDGNDCASMMMKVMLNNQEYQLSMMLDFKSGIRESMLNIDPDQPIPELLEQLSSDINFTPVSPDWLKQILPWILSVQQNKNTPLDLYSLYWIAQLPIDWTQPEAFDLEQWSQKLSYEVNPKRQENSRLGYANYGHNVQSSLMMTWLPPEEYLLKAKKPRDLLKLYYYANKDIFAGRLTYSAAIEKYKLSSEERCLTNEYLDLAHALYDPAINRKRFGLFDNLSEASFQLFAMGLTDTSDSILPQGLVVKISLDEASPAVWRRVHLSNQMTLSEVHDVIQAAMGWEDAHLFCFEVGGIMIPEENYDQVCLGLFLRDVGSELHYQYDFGDCWDHQITVEKVLEKDIIQPKVTAGNGTCPIEDSGGIWQWNNVLKLRKKKLLTEEEAEYLELLGLDPHQPLEPFDKQEANHKLGALFSYLDYQG

SEQ ID NO: 7510 - protein, 358 aa, Xenorhabdus sp.
VTMSYGGIQTAVWELAKALTDAGHEIHIFGGTGDIKPELGNRNIRVHTFPFIPRERVINIGRRFQRIVERYSFARHAREAVIAENFDWVILTKPFDFFWPRMMPTHSRTKFCYMSGGTSFFKGDRLLGKKISAWAACSHFNGWQIQHHFKQFPNVIYNGVDIDKFKPAHSDIRSKLGIHENTFLLTFAGRLVGWKGMKVAIKAMALLRDKDVKLLIIGAGEELKQLERKVAELRLEQSVIFHPPVSHDQLPEFYAAGDAGIFPSIGDEAFGITIAEAMACGRPVIASYIGGIPEVVGNENQSGILVAPGNETAIAGAVNHLLSLPDRGKDMGKRARQRIESLYTWEHSANRLLDTIKK

SEQ ID NO: 7511 - protein, 308 aa, Xenorhabdus sp.
VIRALKLNWPEANIDVLVHKRTKEILENIDEINSIIAFSKTKAKWRGWFSRHSYDLALVYSNDKPLLQYARRKANVVVCFSDHSRQNLNELSVEKPQELMRAQQERALLANALGIEIHDWRLKYCVSPSEAEYAHSFLHLHRLEDKLRIGFQLQSFPAKSYRDWPVDSFYELAERIYSHYPSASILLLGSQDSAEVAERLSEQLGTQRCISLAGKTTMRQNAAIISQLSLYVGVDTGTTHLAGALGIPMVAMYHSFHPGRFLAPQQHAKLAVIEHPVDYRQATREDHMSDISVEQVWQSVKSILEAED

SEQ ID NO: 7512 - protein, 374 aa, Xenorhabdus sp.
MTLKMTRKTLNILHTESSCGWGGQEIRILTESQGMMRRGHHVVIVCCLTSTLYREAHHYGVPVVALPIEKKRLSCFTAMRRWLKAEGHRFDVINTHSSTDSWLVAAASATLKRMPPIVRTRHVSTNVSTSIATRWLYLKSCRHIVTTGEKLRQSLHTNNRYPLSHMTSVPTGIDLTRFHPENKQACRQRIGIADKPTIGIVATMRTWKGHRYLLDSWKALHQRYPEWQLLFVGDGPQRKNLEPWVKQEGLTDSVIFLGNRQDVPDCLNSMDIFALPSFGNEGVPQGIMQAMACGLPVISTSVGAISEAVIDGETGYIIEPKCVEQLTNKLELLIRNAELRLQMGDASLKRAIAEFGMDNMLDKMESIFITSGRK

SEQ ID NO: 7513 - protein, 78 aa, Xenorhabdus sp.
MSRVCQVTGKRPVSGNNRSHALNATKRRFLPNLHSHRFWVESEKRFVTLRVTAKGMRVIDKKGIDTVLAELRACGEKY

SEQ ID NO: 7514 - protein, 219 aa, Xenorhabdus sp.
VNSDLAPREKLLAYGAVALTDAELLAIFLRTGARGVPVVQMAEHLLQSFGSLYHLLSADYADFCSHKGMGLCKYVQLQAVSELAKRFFSSQFIHEDVMSSPVATQNYLQDLLSWQDREIFVVLFLTNQHKVICHDEMFKGTINKVEVHPREIVKQAVKVNAASIILAHNHPSGNPEPSLADKLVTEKIIEACDLIGVKVLDHIVIGKQYCVSFVERGWI

SEQ ID NO: 7515 - protein, 213 aa, Xenorhabdus sp.
MKAYQREFIELALKKQVLKFGEFTLKSGRKSPYFFNAGLFNTGRDLALIGRFYAAALQDSGIPCDLLFGPAYKGIPIATTTAVALAEHHDIDMPYCFNRKEAKDHGEGGTLVGSPLQGRVVVVDDVITAGTAIRESMEIIKQHGATLSGVILCLDRQERGRETLSAIQEVERDYHCQVFSIITLNDLITYLRENPEMQSHLEAVEAYRREYGI

SEQ ID NO: 7516 - protein, 243 aa, Xenorhabdus sp.
MSQIGMRPAGRAVEQVRPITITRNYTKHAEGSVLVEFGDTKVLCNASVEEGIPRFLKGQGQGWITAEYGMLPRATNTRNAREAARGKQTGRTMEIQRLIARSLRAAVDLKKLGEYTITLDCDVIQADGGTRTAAISGACVALVDALNKLVADGKLKESPLKSMVAAVSVGIVEGEGRCDLEYVEDSAAETDMNVVMMDDGRMIEVQGTAEGEPFSHDELLSLLSLAKGGLETIFAAQRDALEK

SEQ ID NO: 7517 - protein, 168 aa, Xenorhabdus sp.
VGSFAYADSQNASIGYAQSKVKNFKDIKGVNLKYRYEWDDPISVIGSVTYMAGKGGLSNKSVTKGLKKHEGDIKYTSFLVGPAYRIHPQVSLYGLVGLAYTNAKINFEHDKDSGDITKKKGSFAYGAGVEINPIDDFVINLGYEGTTFKMADMNSPINGFNLGVGYRF

SEQ ID NO: 7518 - protein, 351 aa, Xenorhabdus sp.
MFMIFSQPTDGFSTSKTSPQRYSHSIIKHIVILFMLLLSISSVSAKEVRQETKLVEVPVLSQSVTDIPNILTKNEHQRLTRQLEKLRSEYKVQMAVLIVPTIGSDSVETFSSRVFAEWKLGSQQRNDGILFLVAYDDHKMRITIGSGLIKQLPDSKVANILSKDAKPAFKEGDYYEGIRTSIDSIGVLIKNAGQEKAPQGVSNIAGDNDNILDNVSSGEDFSAPLILWLLGMVVLPLAVFRTGGWFKRFLKCASTVAVITFVLSLVGVFPALPLGYYLLIFFLPVILVLIVLFFGASLVGGLFKRFFGGSGSASPVSSSDIFVENAELSDNKDIFTGGGGKSDNKGASDSW

SEQ ID NO: 7519 - protein, 463 aa, Xenorhabdus sp.
WRDLFSSKNAPSAIVLSIGIGLMAANTLIAITLLPSAVKDIGGLNLYAWNTTLFVVASIIGSILSARLLHTSGARNAYLVAALIFLIGSLWCALAPTMESMLVGRTIQGLGGGFLFALSYSMINLVFEESLWPKAMALISGTWGVATLIGPAIGGIFAEMNAWRYAFGMMLPVILLYALFSYRILPPKQKQKTSKMALPITQLILLSVAVLAVSSGSLSQDVKMNILGIMTAAVLVFLLVLYERKASVKLLPENALSLNSPHLILFATMMFLVIGLSGDVFVPYFLQVLHEQSPLASGYMVAMAAIGWTIGEVMSASWQGAKMRFAIVSGPAFMLVGMLLLLAMLPYKSIGEWQIILPIILGLGLFGFGVGFGWPHLLTRILQVSSEADRNIAGSSITTVQLFATAFGSALAGMVTNIFGFYQPGGLEGAASASHWLFLLFAVAPILALFTAWKSAKITAESR

SEQ ID NO: 7520 - protein, 515 aa, Xenorhabdus sp.
SVGVFSILFGLTFLLSARWLFSVVFTGTLFIIIKFLNQLKVHYYKDQLMFSDLNIMLDPSNQETLHHYWLAGLAVAAMLVWLIFNIFLSWKSAKPVPGIKWRGLSVVLVAVGVWDVNMTVSAYHNEWQAELPKGRGTMTNMVMSARDAQYQPPQFGVSADYFLQQAKNVSLPEAQSEIKPDVVVLLQESTVDPHIYQLPTGTRLPNLFMFGHDADVSAQGLLRVQTFGGGTWLSEFSVLTGLDTDDFGSRKNGVFYFVVDHLQNSLFRTMKDNGYYTVVLTPFNKSAYHAGHAYQTLGVDRIIQPQELGYPASMDENLWKISTQDMLSYVKTILAKETDKPIFIYSLTMYEHGPYEESHSDDYGLAGKLENSSAVGKFSHYMEKIIASDPSIREFSEFVAKRDKPTIFLTFGDHQPNIHFNDYASTLSDPAHLTQFTMRDNLKQGEPITTGKLTDISFLGGMILERARLSVPAFYQANMTMRHLCGGELNDCQDKALVESYKHYIYQQLSVAGKE

SEQ ID NO: 7521 - protein, 302 aa, Xenorhabdus sp.
MNTVALITDEASLPEDYDMPLLLDACRTIGLSTEICSWQDQTIDWSRFDAVLLRSPWSYVDHLPEFLVWCERISVLTELLNPLPVVRWNLDKFYLADLAAHGVPVVPSRFISPGMNILQNLRAFLAEHTEADEIVIKPTVGAYSKDIQRYKRQQEDKAVEHITYLIEKGCHVILQPYLASIDSEGETDLTYFDGIYSHAIRKGALLMSDGTVNFPLQEFRKARVADEDERAVASLALDTAVRHMGLDHALLYGRVDLVRDNGGKPIVLEIEICEPSLNLPFAESGAMRFAQALADRLIKYSA

SEQ ID NO: 7522 - protein, 318 aa, Xenorhabdus sp.
MPLYNSILETIGRTPIVKLNRMAPSHATVYVKVESFNPGGSVKDRLALSVILDAEAKGLLKPGDTICECTSGNVGIALAMVAAARGYKFVAVMSDSYSVERRKLIRMYGGKVILSPGHEGSSGGNRLADKLAAKHGWFRANQFQNPANPAYHRETTAAEILSDFAGKRLDYFVTGFGTSGTLTGVGQMLKLARPDVNIIATEPENAAVLAGNSWNLHQIQGLAPDFIPDILDKSVIDKLLTVDEISARDTARRLAREEGIFVGISAGATLATALRVAESAPENSVLLAMLPDTGERYLSTFLFEGMNEGSDDEWLASL

SEQ ID NO: 7523 - protein, 86 aa, Xenorhabdus sp.
INGAPVWIHIDWDVLEPGFLPADYSVPDGMLPSQIQAIFEAMPLEQLLGVELSEFNASTDEEKNEKALSIILDIVAPVFETAAKVK

SEQ ID NO: 7524 - protein, 164 aa, Xenorhabdus sp.
SKGQKDIGYDEVVARSEMEHSSRNAAIAYLMKSFGNFENDVLTVLQTYFQYCALKMNCVELSQCFIYLANKGRMIDSGQQILSLRQTRQINALMLTCGMYDGSGEFAFRIGMPGKSGVGGGIVCVVPGEFTVTVWSPELDRAGNSLAGCAALEKLAARIGRSIF

SEQ ID NO: 7525 - protein, 240 aa, Xenorhabdus sp.
MLRKIVVAASLVFAVQAQAGSECRTTLKDDIIVTADSVQMIGEHRSLKIMPDGSVFRNGKALSLNADQRSKAKQFQQLTRQDLPWVKKEALNHLTDARQALDKVVTETMGKDSNIRVRLTKLESGLNKQIDKVLETRPDGIFFHYQAIKQIETEGKDLIQQSLGGILQDSINEMSRKTSNQNGDGKQMLMSLLGGLGGMQNGFEAEWKKQEKELKRFKGEVCDKANKLEQLRTRFLNSIN

SEQ ID NO: 7526 - protein, 314 aa, Xenorhabdus sp.
MKKILPIILASLFSVTSHSAFSQQSTTFTPNSVITQSGDYLTVKHHSGETKVKKNPERVVLFDFGTYDSMAKLGLSERVIALPKESLPEYVSSNVSEKMNDAGGMKSPDLEKLAEIKPDLIVITGRQGDFYDRLSQIAPTVDLSTDNKNYLPSVENNLKLLGELFDKQDAVKAQQADLEKTITTAQEKAKSSNNKVLVLLHNAGELYPNNQTVVYNVVKAQRAELPPKSDNDKSRLVTAEMIAQANPDVIFIIDRSKAIGAGELTKAQFETVQVKSTNAYKNGKIVYLQPDLWYLSGGGIESLTRQVNAIADAL

SEQ ID NO: 7527 - protein, 30 aa, Xenorhabdus sp.
MSHIPRADKGDFSIFHEEIVSNINELMLSC

SEQ ID NO: 7528 - protein, 86 aa, Xenorhabdus sp.
MTLKITALLENQVFAPYKGSLINKQGLSLLIQDQENTILFDTGPDGSFIDNAKKLNIDLSKVSTVIVSHGHFDHCGGLPFFLLMLK

SEQ ID NO: 7529 - protein, 422 aa, Xenorhabdus sp.
NSGNNFTPENLLALPEVYGTPLWVYDSDIISRQIGKLKQFDVIRFAQKACSNTHILRLMREQGIKVDSVSLGEIERALHAGFQPGRDKSEIVFTADLIDEETLERVIELDIPVNAGSIDMLEQIGQRQPAHPVWLRINPGFGHGHSQKTNTGGENSKHGIWFQDLPLALEKIHQYNLNLVGLHMHIGSGVDYQHLANVCNAMVEQVVSCGVDIQAISAGGGLSIPYKNGEEAVDTCHYYNLWHEARQRIEQHLGHHIKLEIEPGRFLVAEAGILMAEVRAVKSMGSRHYVLADAGFNDLMRPAMYGSYHHISVLSENCDGTHSDIGENSSRSGLKETLVAGPLCESGDVFTQLEGGEVIPRMLPDISVGDYLIFHDTGAYGASMSSNYNSRPLIPEILLVEGQPRLIRRRQTIQELLSLEEV

SEQ ID NO: 7530 - protein, 193 aa, Xenorhabdus sp.
MYQDLIRSELSEAVETLTNFLNDNANIDAIQKAAVLLADSFKAGGKVLSCGNGGSHCDAMHFAEELTGRYRENRPGYPGIAISDPSHLSCVSNDFGYDYVFSRYIEAVGQQGDVLLGISTSGNSGNIIKAIEAARAKGMKVITLTGKDGGKMAGTADVEIRVPHFGYADRIQEIHIKVIHILIQLIEKEMVKA

SEQ ID NO: 7531 - protein, 255 aa, Xenorhabdus sp.
MCELLGMSANVPTDIIFSLSGLIQRGGNTGPHRDGWGITFYEGLGYRTFKDHQPCYHSPVARFIQGYPIKSEAIIAHIRQANRGNVSLVNTHPFTRELWGRYWTYAHNGQLKGHRNLKTGNYRPVGETDSEWAFCWILHQLSVKYPKRPSNWPAVFRFIASLADELREKGVFNMLLSDGRFMLAYCSTQLHWITRRSPFGKAKLLDQDIEIDFQEHTQPDDVVSVIATLPLTHNEEWHKIEPGSYALFHLGERVV

SEQ ID NO: 7532 - protein, 447 aa, Xenorhabdus sp.
MIKIKKGLDLPIAGAPAQVIEDGPTIRHVALLGEEYVGMRPSMLVKEGEHVKKGQILFEDKKNPGVVFTSPASGKVVTIGRGERRVLQSVVIEVNGDEKIAFDRYERTELAGLTREQVEKNLLASGMWTALRTRPFSRSPVPGSTPKAIFVTAIDTQPLAADPSVVIATQEEAFVDGLNVLSKLTEGKIHVCHGAGKIPASGNNPQITYSQFAGPHPAGLVGTHIHFIEPVSAQKAVWHLGYQDVIAIGKLFTTGELYTDRVISLAGPQVKTPRLVRSRLGADLLEVTHGQLKEGENRIISGSVLCGAKSDEAHHYLGRFHTLVSVLSEGREKELFGWIAPGTNKFSITRTTIGHFLKKKRFAFSTSTNGGDRSMVPIGNYERVMPLDIMATHLLRDLLAGDTDGSQALGCLELDEEDLALCTYVCPGKYEYGPVLREVLTKIEQEG

SEQ ID NO: 7533 - protein, 412 aa, Xenorhabdus sp.
MGLKNYFEKVEHHFEAGGKLEKYYPLYEAVSTVFYTPGTVTKGKTHVRDAIDLKRMMILVWMSVFPAMFWGMYNVGNQAIPALTHLYSGEALQQVLSSDWHYMLAQYLGASLTPDAGWASKMLLGATYFLPIYAVVFIVGGFWEVLFAIIRKHEINEGFFVSSILFALIVPPTLPLWQAALGITFGVVVAKEIFGGTGRNFLNPALAGRAFLFFAYPAQISGDLVWTAADGFSGATPLSQWANAGLHALMNTISGQPVTWMDAFLGNIPGSVGEVSTLMIFIGGVIILFARIASWRIVAGVMVGMVAMSYLFNAIGSDTNPMFAMPWYWHMVLGGFAFGMIFMATDPVSAAFTDKGKWAYGILIGVMCILIRVVNPAYPEGMMLAILFANLFAPLFDYLVVQANIKRRKARG

SEQ ID NO: 7534 - protein, 257 aa, Xenorhabdus sp.
NNDSIGRTFFVVFVLCLVCSIVVAGSAVGLKAQQQEQKLLDKQRNILDVAGLLKPDMTTAEIKEVYDSRIQPELLNLKTAALEKSDGKFDLNNALRSDETSIALSSKQDLAKIRRRADMAEIYLVKDDHGKTTELVLPIYGSGLWSMMYAFISIDVDGVTSRGITYYSHGETPGLGGEVDNPQWRKQWVGKKLYNPEGAPAIKIVRGGAGDNPYGVDGLSGATLTSNGVQHMFDFWLGDNGFGPFLKKVREGALKDG

SEQ ID NO: 7535 - protein, 125 aa, Xenorhabdus sp.
VVDQVLQAYAYEISKQLSVFVGLIITNCIVMGRAEAYAMKAPPVESFMDGIGNGLGYGVILLLVGFLRELFGSGKLLGITVMESIKNGGWYQPNGLFLLAPSAFFIIGMLIWGLRTLKPEQVDKE

SEQ ID NO: 7536 - protein, 198 aa, Xenorhabdus sp.
MEHYISLFVRAVFIENMALSFFLGMCTFLAVSKNVKTAFGLGVAVTVVLGISVPANNLVYNLVLRDGALIDGVDLSFLNFITFIGVIAALVQILEMILDRYVPALYNALGIFLPLITVNCAIFGGVSFMAQRDYNFSESIVYGFGSGMGWMLAIVLMAAIREKMKYADVPAGLKGLGITFITTGLMALGFMSFSGVQL

SEQ ID NO: 7537 - protein, 406 aa, Xenorhabdus sp.
IIILGVVMFTLIVLALTAMILFAKSKLVNTGDIKVEVNGDEDKSFTAPAGDKLLGMLANQGIFVSSACGGGGSCGQCRVKIKDGGGDILPTELSHINKREAKEGCRLACQVNVKQDLKIELPEEIFGVKKWECEVISNDNKATFIKELKLKIPDGEVVPFRAGGYIQIECPPHVARYSDFDVPDEYREDWDKFNLFRYVSEVSEPTVRAYSMANYPEEHGIIMLNVRIATPPPRNPDVTPGIMSSYIWSLKAGDKVTISGPFGEFFAKDTDAEMVFIGGGAGMAPMRSHIFDQLRRLSSKRKITFWYGARSKREMFYTEDFDQLAAENENFTWHVALSDALPEDNWDGYTGFIHNVLYENYLKDHPAPEDCEFYMCGPPVMNAAVIKMLKDLGVEDENILLDDFGG

SEQ ID NO: 7538 - protein, 346 aa, Xenorhabdus sp.
KKIINWGVMLLAAMLLSACGGPEQQNLSGQTMGTYYSVKYVADSSVPSPENMQKEIDRLLEEVNDQMSTYRPNSELSRFNQSREVNTPFPVSAATAKVVKEAIRINKLTDGALDVTVGPLVNLWGFGPEGRVTKAPTEDELATRRAWIGIDKLSVEGNSLIKSIPELYVDLSSIAKGYGVDVVAEYLASQNIGNYMVDIGGEVRTAGNNGKGTPWRIAIEKPSDSGMTQSAQEIIAPGNMAVATSGDYRNYFEQNGVRYSHTINPKTGRPIAHNLVSITVIAPSCMSADGFSTGIDVLGPEKGMEMAEKLNIPVFMIVKTKDGFEERYSPAFKHYLQQKDDLQQKK

SEQ ID NO: 7539 - protein, 57 aa, Xenorhabdus sp.
MALGYIFKRKSIQGSCGGLGSIGVEKVCDCPEPCDARKKREAREASRLAQLEKNRII

SEQ ID NO: 7540 - protein, 279 aa, Xenorhabdus sp.
MEANPGTVEADRFSAYQQAGINRISIGVQSFGSDKLIRLGRIHGPEEAKRAARLADSLSLRSFNLDLMHGLPNQTLDEALNDLRQAIELSPPHLSWYQLTIEPNTSFGSRPPVLPDDDALWDIFSQGHRLLTEAGYQQYETSAYAKQDYQCQHNLNYWRFGDYLGIGCGAHGKISFEDGRILRTVKTKHPRGYMQGRYLDKQHQVDHDDRPFEFFMNRFRLLEAMPRKDFSNFTGLPESTIRQQIDAALAKGYITESDTHWQITKHGKLFLNSLLEMFL

SEQ ID NO: 7541 - protein, 197 aa, Xenorhabdus sp.
MQKVVLATGNAGKVRELADLLADFGLDIVAQTELGVNSADETGLTFIENAIIKARHAAAVTGLPAIADDSGLSVNALGGAPGIYSARYAGADASDQDNLEKLLEAMSDVPDDQRQAQFNCVLVYLRHAEDPTPLVFHGRWSGFITREPAGNGGFGYDPVFYAPEFGCTAAELSREQKSAVSHRGQALKMLLEAMRNA

SEQ ID NO: 7542 - protein, 184 aa, Xenorhabdus sp.
MQFLNFLFFTVLDLYTAVLLLRVWMQWVRCDFYNPFSQFIVKITQPVVRPLRRVLPAIGPIDTASVVFAYILVMLKLMLPYWLATGQFLVQLFPLGIIELLTAAGKLVFWLVIARALLSWISQGRNPVDYVLLQLTEPLMAPIRRIIPSMGGLDFSAMIVILILYALNALRADVLAWLIPSLIG

SEQ ID NO: 7543 - protein, 234 aa, Xenorhabdus sp.
MHNIEQNLHDVRNNIALAAQKCGRSPEEITLLAVSKTKPAEAIAKAIATGQREFGENYVQEGVEKIQLFVNHNDLVWHFIGPLQSNKSRLVAEHFDWCHTIDRLKIAQRLSEQRPESMAPLNVLIQINISGENSKSGILLEELEELAATVDLLPNLVLRGLMAIPAPEEDYERQTAIFRRMEQAFIKLKAQYPRIDTLSMGMTDDMEAAIACGSTLVRIGTAIFGAREYGSTAS

SEQ ID NO: 7544 - protein, 139 aa, Xenorhabdus sp.
MKNRTVIAFDFGTRSIGAAIGQEITGTARALDSFKAKEGSPNWDMIEKLLKEWQPDLVIVGLPLNMDGTEQPVTAQAKKFANRIHGRFGVQVELHDERLTTVEARSHLFAHGGYRALDKGKVDSTSAVVILESWFEQHC

SEQ ID NO: 7545 - protein, 187 aa, Xenorhabdus sp.
MNLQHHFLIAMPSLTDPYFNRSVVYICEHDQNGAMGLIINKPIAQVSIQGILKKLEISPEDRDDNINLNSPVMAGGPLSEEHGFILHTPLSGFSSSIQISDETMVTTSKDMLEALGTPRQPKNILMTLGYAGWEKGQLEKEVMENSWLTVSAEPSIIFNTPVADRWREAASLLGINIHNLALQAGHA

SEQ ID NO: 7546 - protein, 319 aa, Xenorhabdus sp.
MIKLGIVMDPISSINIKKDTSFAMLLEAQKRGWEVHYMEMNDLYLHQGEGRARTRLLTVEENPLQWYQFGSEQDIALDTLNVILMRKDPPFDTEFIYATYILERAEIKGSLIVNKPQSLRDCNEKLFTAWFPELTPDTLVTRNARTLREFHKKHGDVIFKPLDGMGGASIFRLKQDDPNIGVIIETLTDHGSRFCMAQNFLPAIKDGDKRVLVVDGEPVPYCLARIPAQGETRGNLAAGGRGEARPLSESDWAIARAVAPVLKEKGLIFVGLDIIGDRLTEINVTSPTCAREIEAAFPEVSVTGMLMNAIEKRLGKQTV

SEQ ID NO: 7547 - protein, 249 aa, Xenorhabdus sp.
KKGKKNMRIPRIYHPDPLTVGAEISLSDDAANHVGRVLRMSNGQRLQLFDGSNQVFNAEITEASKKTVKVYIHTGELADHESPLDLHLGQVMSRGEKMEFTIQKSVELGVNTITPLLSERCGVKLDAERLEKKLQQWKKIAISACEQCGRNQIPEIRPVMSLEAWCAETDNSLKLNLHPRASQSINTLPLPVEKVRLLIGPEGGLSAEEIEMTANHQFTDILLGPRVLRTETTALTAITALQVRFGDLG

SEQ ID NO: 7548 - protein, 299 aa, Xenorhabdus sp.
MANKTTVHKTILNTALATALSLGMGTFAQAVELKMDIYNPGEESIFPVSSEVISGEHEVVLIDAQFRKSDAQELVKMIQKTGKKLTTIYISQSDPDYYFGLDVITEAFPEAKVIASPETIKAINETKDGKLAYWGGVLQDQAPKKIIVPEPLKGNTFTVDGEKLIVEGLNGPAADRTFVWVPKLKAVVGGVTVSENIHVWIADTQTKSSRQNWMQTLDQIKNLKPETVVPGHYVGHTAMTLESVNFTQNYLATLEKELPKAKDSAALISVMKKHYPNLAEESSLELSAKVLKGEMTWPQ

SEQ ID NO: 7549 - protein, 832 aa, Xenorhabdus sp.
TTQQVRPLTTQPEIYRSFTMTVLSIILFLALIGGLCYRKVSLTVSSLLLIAYTFIMGVTGLWSYWLLLPLAIILFPLVFTPTRISLFSAPGLKAFRKVMPSMSRTEKEAIDAGTTWWEGDLFRGNPDWKKLHNYPKPQFTAEEQAFIDGPVEEACRMANDFQISHELADLPPELWAYLKKHRFFAMIIKKEYGGLEFSAYAQSQVLQKLSGVSGILAITVGVPNSLGPGELLQHYGTDEQKKHYLPGLARGEEIPCFALTSPEAGFDAGAIPDTGVVCMGEWQGDQVLGMRLNWNKRYITLAPIASVLGLAFKLYDPDHLLGETESLGITCALIPTNTPGVEIGHRHFPLNIPFQNGPTRGQDIFVPIDYIIGGPKMAGQGWRMLVECLSVGRGITLPSNATGGLKSIAMAIGAYSYIRRQFKLPIGKMEGIEEPLARIAGNSYLMDAAATMITSGIMLGEKPAVLSAIVKYHCTHRGQRAVIDAMDIAGGKGICLGPSNFLARSYQGAPIAITVEGANILTRSMIIFGQGAIRCHPYVLAEIAAAEKNDVKAFDKALFGHLGHVASNTLRSLWLGITNGRTSSTPVNDATRRYYQLINRLSANLALMSDVSMGVLGGSLKRRERISARLGDILSQIFLASATLKRYEDEGRQKEDLPLVQWAVEDALYQAELALHDLLRNFPNRLVAGLMRGIVFPLGRSRTAPADKLDHKLAQILQTPSATRDRIGRGQYLTPSEHNPHGLLEEALHDVIAAEPIHARLSREAGKNLGFTRLDQLAEKALSDNKITKEEADILKRAEASRLRSINVDEFEADALSVPNATKKANKQIKAA

SEQ ID NO: 7550 - protein, 246 aa, Xenorhabdus sp.
MKKNILYFSFSWFLVSVPVVTQAQGWLSGSKQLSEKSPLKQLGSDIFIQIFKEEKVLELYTKNSTGHYQLTRQYPICNYSGGLGPKTLKGDLKSPEGFYHVSLKQLKPDSSYYRAINIGFPNQFDKYRGYSGKNLMIHGACKSIGCYAMTNLYMDEIYRYAESALHRGQREIKIDIYPFRMTPSNMKRHHNNVNYPFWEQLQPAYEYFVQHSTPATVKVIRGQYVLNQVAQPDNQTPSDYAFTKVK

SEQ ID NO: 7551 - protein, 171 aa, Xenorhabdus sp.
MAVQKSTFGHNEIARQLYNEYHEWLLSWIKQNCASLNHAEDLTHDVFIKLMQYPDMAEIRYPKAFLITIARRTIANYYRRKKLEENYLDYISTVPKNTSYPTEHQLVLLEQLERIDSTLDKLPIKVRQAFLLTQLQGMRYKEVAEDLGISMSSVKSYLQQAHKRCHPFNTL

SEQ ID NO: 7552 - protein, 702 aa, Xenorhabdus sp.
PNSPSAVSSALKKEDIDRTQADNIAELLGQLPGVSMSGSPRPGGQTLNIWGMGEQEDVKVTLDDAPKGFEKYRQGSIFIEPELIKRIDVDKGPHNILNGNGGFGGSIKVVTKDANDLLRPDEDWGGFIKQSFHTNDRQWINSAALYGRDSNGYADGLLYFSKRDGHNIKRPDGTRFEFSQNNQTSYLLKTNFYPNDTHTVSLSAMRSESDGWQPWAAKRDKMNVPTESDIEKYGWNDAWRKLLVFRDQIDQNYSAKWNIAPEDNPWLNLTITSAYSNTRQNDRRPEIKDVKPTSASLMGQKSWIKYTDTMVDISNKSVFSTNLIEHELLVGAHWHKNDRDVLMFDKNKKKDPTFNYGYYQPGYMPAGVQQTYSLFTQDSLKIDSVTVTLGARYDHIKNTGEKNKASAYNNMSPEINHDYSSVTYAGWSPHLGTIWQAHKNLSLFADISRTWRAPVIDEQYEVQATGSLPGSSRNLDVEKMTGIRLGAILDFDDLMLEGDSLQIRTTLFRNRGKNEIFKRRGIYCKAQLDGISYTNCEKPLSNYRNLPGYTIEGLEIETFYDSRVLFGKFSFSTIRGQRDASMRDPWIGHKTWITEIPPRSAHAMLGIKVPQWHMAMGWKGEFIRKQDRSASDSDPMAKSWDLPKTKGYALHGLFASWQPPFIQGLEARITVDNLFNRDYYPYLGEASAGIGRNYKLSISQQF

SEQ ID NO: 7553 - protein, 66 aa, Xenorhabdus sp.
RNDWHQADIIAALRKRGTTLAAVSREAGLSSSTLANAFSRPWPKGEWIIADYLGIHPSEIWSSRYF

SEQ ID NO: 7554 - protein, 336 aa, Xenorhabdus sp.
MGSLNVLIGANGAGKSNFISFFRLVSVLLDQRLQSLVGRMGGPDTLLHFGRKKTECMSAALSFGHNSYQFELEPTNDNRMMFRHESLFGDSKREYDIGAGHLESQVNQHHANPENETLPTTLRWRVYHFHDTSDSAKVKQTHRINDNDYLREDGANLAAFLYRLQKHHQQHYTRIIKTIQMVAPFFGDFYLRPTPDNADYIQLEWTEKEQDIPFKASELSDGTLRFILLTTVLLQPEAYMPDSIIIDEPELGLHPYAINVLAGLIKNASNQHQLIISTQSVELVNQFDADDLIVVDKQQGASTFKRLDNETLSEWLEDYSLGELWKKNLLGGRPQR

SEQ ID NO: 7555 - protein, 229 aa, Xenorhabdus sp.
MEEKLTRRETTAMIRINVFVEGQTEETFVRDVLAPYFFAQQIYLTPILAQTSSRQKGGITSYGKVKHQITRLCRQDPGAFVTTLIDYYGLPTDFPDYDIQRDNAANERVVQLEQAFANDIGQTNFIPNLLLHEFEALLFCQPEKFADWLDDNAPIAALQAIKDKFDTPEDINNSPQTAPSKRILAIIPNYHKTLHGPLIVGDIGLDTIRSQCPHFSQWLNKLTTLIARM

SEQ ID NO: 7556 - protein, 200 aa, Xenorhabdus sp.
MNSTKTLLELVGAPEKTLDWNKAALVLIDLQKEYSDGALPLGKAGKNAIVNAAKLLDHARKKHIPVFHVVHHAKTGSALFDPATDNVHFIQGVEASSEEYIITKSLPDSFYNTPLNELLSLTHRNQLILAGFMSHMCVTATTIKALELGYENFVCTDACASRDLKYIDGSIIDADSVHRTAMAALNDRYTTLIDCANVIR

SEQ ID NO: 7557 - protein, 67 aa, Xenorhabdus sp.
MTMTAKTNFIRLPEVQRRTGYSKAWIYKLISDGEFPKQVKIGPRSVAFIEAEIDNWIAQRIAESRAA

SEQ ID NO: 7558 - protein, 666 aa, Xenorhabdus sp.
MDKISQLLDRSGLVFTLITENLPEQTFAVVDFSLNEALSTPFRLEATLTCQTADINFADVLDSSAAFAVHRNGRIERQVTGMVTHFSLQSTGRHQSHYHITLQPPLWRASLRVNSRIFQNQSVVDIVESLLRENGVRNFFFALGYKHPPREFCVQYDESDLAFIQRLMADEGIFYYFTFDQEQHEQRIVFHDSCLSLNQVITVPYRPETDVTGETTCIRQFSWSERVGVANITTKDRTFKNPRWNREFWYEGRNLDNQRILNSYHYYDFPSRYKDDELGQRASQYRLEYLRRDTQLGNGQGDCFAMWPGQLFNLMDHPREVFNDQWQLIQITHSGQQPQADETQSGGSGTWLSNHFTFTTRKNSYRPSPYPKPQMEGPHIATVVGPEGEEIFCDEHGRVRIQFDWDRYGEFNDRSSCWVRVSQAWAGQLMGMIAIPRIGHEVLVDFVHGDPDQPIIVGRAYHANNIPPNRLPMAKTQMSIRSKTHKGEGFNELRFEDEKDREEVFIHAQKNLAIQVRNSRGERINYDRTTSIGHDDELVIANNRKVTVEGQQDHKTTGNYIEQIDGDRSLQLKGDLAEKIQGVVSVDAQGDLTLQSGSKITLNVGGNFVVLHAGGIDIKGTAINLNSGASPGDLLAPANPAILLAAASEGSMFVAHCPMKEKEKPE

SEQ ID NO: 7559 - protein, 269 aa, Xenorhabdus sp.
MSQEKLYALIDGAAESDLFLMLERYDPPSACLYGEPLQPELVEIAPYLVQVTEEVKIWLECRKTPWGIFVHSAADMKTVRQHLRKYLQVLLPQQEKPVFFRFYDPRNIWDFLGVLSDWEVHCFLGPITRITTRYLEEEHTDNFVKVREPFPANAKGKYKIFKINEEQYTLIEMKQKEKYLQKLDSILLSELANLRKSISINNSLPFLAFFYDYLISEKITDMRSIEEILKKVVREDNFDIDEFDKSILTRLSDDETPGWYRAKKFILNI

SEQ ID NO: 7560 - protein, 72 aa, Xenorhabdus sp.
MNTDSVGIEVVAAYNKTSKSWDQATTQQNESIKKLINLLKCNYSLGNSDIYEHDKISYKTEGEGADLYSNSI

SEQ ID NO: 7561 - protein, 114 aa, Xenorhabdus sp.
MSRRYVVEALLRPAVELNTAVVSAVAAFICISAPWAIALTPSVSYVMAGGFTVLAIIRTWQGIQVICYRRNLSRLPRYQMSTQRIPVSHQRLFLGRGFRWQQKHTQRLQDTRRP

SEQ ID NO: 7562 - protein, 158 aa, Xenorhabdus sp.
MTTGHAELNVIADLGGKDASPFYESIDAQPDHRSAQSHHFLPEVVGEAAMLPVNTPELTPGTVTRRALQLPGIGALFLIGDDPESHQWLSQHATTLAKLHAVGLVVNVREMAGLQTLRALAPDILLSPASGTELARRLQLQHYPVLITETQLSQQPSP

SEQ ID NO: 7563 - protein, 225 aa, Xenorhabdus sp.
VLVWLLSSPVWAVTPTPLASQQTHTTESQPQSLKSQAEQWQLSAGEYQRYQHLMNGPRGLRSPGLDPLTALGIEAESDVERRRYAEQWVKAEFARTEKELRFQREVNTAWQRLFPDVLPVNMEKSRENNGRLALFVRAKDCPQCDTRLIEVLAAKQPVDIYLVDSQRNDDTLRQWAKTHHIPVEQVRNRQITLNHDAGYWFRFGKGLMPVLLRQGEQGWQVTSLQ

SEQ ID NO: 7564 - protein, 171 aa, Xenorhabdus sp.
IAVILTGCTTPVKQLLPQPSQNSFSSVTLTRNIQSVSPDIYQQTPEVVRYGRYVLVSTAPTAAQRDPLSQLMDIQLPASQSPTVADAMRYALRQSGYALCVPDKRNDILYRQPLPSVHAQLGPIRLRTALQVMAGSAWQLEVDEVQRVVCHHLRQGYQLPAPAKQPQSGGR

SEQ ID NO: 7565 - protein, 35 aa, Xenorhabdus sp.
MEPAEIWPSRYFDDYGNFIERKIRLSVDENQVAAE

SEQ ID NO: 7566 - protein, 170 aa, Xenorhabdus sp.
MSSRGINKVILVGYLGQDPEIRYLPTGGTVTTLSLATSDSWRDKQTGETREKTEWHRVVIFGKLAEIAAEYLQKGAQVYIEGQLQTRKWQDQQGQDRYSTEVVVNVNGTMQMLGNRGDAKPVAKQQSAPKSVQKTQSSQDVKKEIAPTQMAQRSALPEDKEEVEWDEIPF

SEQ ID NO: 7567 - protein, 69 aa, Xenorhabdus sp.
MNIASIGVLALQYCHKQLPLTVLQSCAGFYIGTMEAGVPCSRESTEYFASREQAELALQQGRWTQRQSA

SEQ ID NO: 7568 - protein, 114 aa, Xenorhabdus sp.
VINALNGPGDNPVYVRFDITVVGKEATSLIGRCQKSVDEDKKVLLGFTLSNPSTDIFTLKRGDHAGEQRVSLKARLIKVDWIKIGQDKVYRAEQSDSAPPQNGVAQTEYAENSF

SEQ ID NO: 7569 - protein, 666 aa, Xenorhabdus sp.
MQLYLCEKPSQARDIANVLGVKQRGQGFLFSTRIIVTWAIGHLLEVAAPEQYGEQFGPPWRMEVLPVLPVQWQWTVKKEAADQFAVIRQLLKQVDEVIIATDADREGEVIARELLEYCRFSGAVRRLWLSALDDTSIRQALAAILPGEQTEALYQAGLGRARADWLTGINLTRFYTLKAQALGFGEVLSIGRVQTPTLALVVSRDKDIANFVPKPYWQVMANLEKDTVRFQAKWLPATEEGDEENRCTREAVAQAVQQCCQQATQATVMAVSKKREKTPPPLCFDLGTLQQTASRLWGMGASQVLTIAQSLYETHKATTYPRTDCGYLPVSMQADIPVVLTALTRTDPAMIDTISQLDEQQVSRVWNDKKITAHHAIIPTRHAFDLTRLTTDELQVYQLIRQHYLAQFLPPQETDVTEVTLDIGGQCFRAKGRVNVTTGWKALFMENFAEDQEKSEADSSLPRFHQGERCRIIAARIQPLHTKPPAPFTEGTLIAAMKNAASLVSDPQLKQVLRENAGLGTEATRAGILDTLFKRRLIERKKKAIQSTPLARELIAGLPEVLTSPGMTALWEQSLEDIAQGKTSLAVFMQKQAQWLLHLVERGKAQPFHLTLPKTPDCPNCGGRMRQRQGKTSPFWGCVNYPVCKGMLNDKAVTQSRKARRANQKV

SEQ ID NO: 7570 - protein, 170 aa, Xenorhabdus sp.
VDAAADNPYADVWLVKLEQALEAASANLRQNLAILQDTLNAVPKQITLSAVSSVEPLNIGVYSHSPLGYRCVWLLVGYDQLAMKTFQAFHYGLISRAERDAFLHNGSRAIRQIYGFVRSYRSLAVTRQDIAQKTPAGLDAIKLLGEPHPDILSGRQRSAFASPLRSIEHD

SEQ ID NO: 7571 - protein, 387 aa, Xenorhabdus sp.
INGLKMKELLQNHPNNREFPVNSFRIVKASIERNKNMDFLNPLKTVGLRILWITTILVIALSTGITDISIDVDNIPSAGFILSVLLVCFTLFGIFLSIYTFFHVKNLPIAEQKDYYQQAGLSILPEEKRQALRLDIVGSYNSGFWVETLEHYPLKSRILQHNDKYRFFPLSESKPHQSQLYTDWGIVDKEGYLKMLYELWAGMHSKHFAVDSVLADGKMFKELSVLIEESTEYVQQCSRSINGRPPALLWGFDLWRAIVLSRNSFAAGYISEEMAWDNILKTADYVYQLFDSFDEFYTNYRLGNAYWSRDFDRAKKRLENFRFYKSHCDWPIAQLPWPKRKDIFMEEYMSNGFADWVNSVLQAQMENSINDEVADEEQEHIVPHILH

SEQ ID NO: 7572 - protein, 386 aa, Xenorhabdus sp.
MKIRLEHRADDDVSQLRSGLLFMGNIQDAYPRRLLLDDRLSPLDKTGWMMIRLYALNNEGAVFPSYDELQVLLASPYKGKASRETVSRVLLMLRITGWLSLCKRIRDDHGRVRGNIYAQHDEPLTCRDAEMLDPHWLDTVAEACRSKNRTISQTALDVLTDIKEDPLMRHRHSHIRLLEERLNAVQTPQQRVMRQSLQQGKQQTELREIRPGSETGLSQKEAQAELNSDTELSLKSRSYSGSAKPNCYVRSFTQSVNKKTYVEPQSAVFLPEGLCRQLEPEDVTMLTSQLQALPTEQAQTVLSCLDKALRAGKIGNPVGWLLTMMKRARDGQLYGQAETVVTPPAPAKASVASTQRIERPVSPSSQAHVRSMVKDIRQRLTLAKYQ

SEQ ID NO: 7573 - protein, 84 aa, Xenorhabdus sp.
MSAKLTEMMPGLHVPSTTPLSLRRKAQHQVSSYQRGERNYVRLKEKGTGYLKINVGLFWRLLSRDDGQSWELMLHERYNNEIRK

SEQ ID NO: 7574 - protein, 188 aa, Xenorhabdus sp.
NNLLLQLVMDLKNGYIRRCEALGLAPDEMLILQNLTIEDLHYLGNSPVSVLTIQIHHSNLARILHQARIEQQRLQRIDRALELGGSIELMRYFFGLSSLEIAARRRIAGMTVKPGRNSPLTEEENQALWQRWQAAKIADTDSAEGLDMMLEMAAHHQISLTAVWHAVKGWQHGEAPEPVKKTSLKAIN

SEQ ID NO: 7575 - protein, 531 aa, Xenorhabdus sp.
MGRNTQNLGHALLQQGRQAVATLNDSPPMAEMPMVLTLDQLRPNPDNPRTSRNPRYDDIKASIKARGLDTVPKVTRDPDGDEVYIFSDGGNTRYQILSELWQETGDERFYRVHCLFKPWPGRLQCVIGHLAENELRGDLSFIEKALGICKARTIYETQKQKKISLRELSGLLSETGFPVSASHISRMEDTVQYLYPWMPNLLASGLGTPQIRLLLVLRQNAETVWQQHVFSINPEPTWTFDEVFGSCCRKFDALEDWSPEMFRDELIGDLLQALPHPFLNYDRWILELDPKESNRRQLFGEQASAFEYVPAVSAAANNVAPIRVPKQESNPRRVSQPVSVSETAQNPEMEYSPVEETGSSVAFSSKNPVIPPYHPENGDNSPESPQNAPEAECLHFAQTGLEPVSSVWDISPMQDDIEHLQSMVFRLAFELAEMMGCDRDLLPVSDEGSAGFCLVNAPEAHAFSRLLLSLTGENTVDAPVLTLTAVLFGTPHREEMPLLDDTQTVKFLRLLRVIRRLRELQRAIAPETIAV

SEQ ID NO: 7576 - protein, 445 aa, Xenorhabdus sp.
AANEVQPSNGYAEMAVIGGLILDNDRWDDLVQLLTPDDFFFPAHRILFQAIVELTEKNTPYDLLTLTDLLTHQGRLDNVGGFAYVAEVCQNTPSAANIVEYARMVAEKSQLRQLLALGNALSTEVFQPHVQAAALAEQAESQLFRLAEKGATRQQQEVTLLQGAEALISHLERIQGSNGITGTPTGFQVLDEMTCGLQAGDLILLAALFSVGKTALGLGWCLGALRQRDEAVVQIFSLEMPTAQLMLRLSSMEGGVALSALRNGILDDEQWGRISQSLEQFSQWDQRLIIDDCSHQTPALLRARARRYTRKYGKPALIMVDYLQLMCAPGQENRTQEIADISRSLKALGKELDCPVLALSQLNRQVEARPEKRPNNGDLRDSGSLEQDADLILHLYRDEVYHENTPDAGIAEIIIGKQRQGPTGTVRVRFEAQYTRFSDFDDSGR

SEQ ID NO: 7577 - protein, 50 aa, Xenorhabdus sp.
VALLECGWAQDKPQYLTASEVLFWVASPQLQQRLIAALNTVSREAGDAQA

SEQ ID NO: 7578 - protein, 232 aa, Xenorhabdus sp.
MQTVDLNQPEKIISRSIIKNLDILISNDPDELLPTAMLHAPDGRLRLRNILQHPLFSQYDIIFIDSKGATGVMSELVVLAATQDVLGIIKPILPDVREFLRGTLRMLTRLRLFENYGIRLPAIQILVNGIEGTNLDRDTLSELTDIINNRRYDASALGGRQIYQLLKTRIDLLDIYKLGHVRAQPVHRLEYKTTRKSPAAAHTIHSLACELVPLWAEKFDAVLIEQPAGDTK

SEQ ID NO: 7579 - protein, 50 aa, Xenorhabdus sp.
MKAPDRNLQLVRCLLGHRSLATTLEYIDIDMEIAGKTLENELAIYLDIAV

SEQ ID NO: 7580 - protein, 66 aa, Xenorhabdus sp.
MLGLSCSENKMQVSILDDQNIETVSKLISLYESTNNFLVIAGIEKSADEILPLYKEIISQLPEERV

SEQ ID NO: 7581 - protein, 84 aa, Xenorhabdus sp.
MVNLEEIKDFLSKEVTTAMYMSADELEPDALFSGYGLESITLAKIVANINEKFLIHLSIKDILPYQSVNKAANYIHSILEEKVS

SEQ ID NO: 7582 - protein, 345 aa, Xenorhabdus sp.
VDLPEKERLEYERIFFLRNFFSKPDLFQNELKQAEQNMAFTLPALESGYSEIETYEVGELTWQKLAQIYAEDIRPIVIKGFASSFPCGQLWTPEYFRDNFGDFQLWYSTTEKLFEENGTSLRDYINGVLKGDISRAYLENLSDIFNKYPILHQQIGIDRIDHFLGDFASYHKIAQLFIGGPGTGAVYHCANELNCFLNIYGRKEWIFVHPKYSAAMYSSMFNKGIFVGSFVKHNAPVRYLEEHQPLYNRIPKLRITLEPGDMLINPPWWWHAINNQPPVSIAIASRWKIEMPYQHQNPLYEFVQSQRMERLTLEGKKMSDNDVVVPDSELRKKYVSYKEMGWVGN

SEQ ID NO: 7583 - protein, 256 aa, Xenorhabdus sp.
VKGNIGHLEAASGMASLIKVILAMQHGVIPPIASFSQLHPSIFIENTPLFFPREPVLWQQASSDKTQPRRAGLNSIGITGVNAHVILETPEQREVPVFSQRKEHVLIPISAKSEKTLKVYLSQWLDYVHQEKLAGHDNPTTLRNLAYSAQTGRADMPFRTAIIVNDLEKLIATLEWMITGENGTPPAGVVVTGVVSSKSRFPKKQVAFSTTLPVLKQLADDWVTGACIDWRAFAQGHGVYVDIPGYPFDEQRYWFL

SEQ ID NO: 7584 - protein, 557 aa, Xenorhabdus sp.
VLDKEVHPGVLFEFTTLEKFADYLMNYQTSAAKRFLTALSSPTLTEETLTAGKVCLSQGNENSCQKTCSSKNTNDLAYMTGMTRGIEQNIPVIIGGGIAGMLISYQLSQEKIPHIIVGKPEIGDMPKLGESMTEVVSIEFARRFKNLSRHFYPKEFTPFFMGELVAGLRFHFFESLASLFMEEDIPEHFIHIDRLGFDKALYEETVAASECTWIEALVEHVEYSEDSDKVSLLHLSDGQIIQPSYVWDCTNHVRLLGRKIGLSYTELDSRRQVIFTHYYQKAGSKLCDSKELPWMHATSLLSADEEFDQLKGVSWLIPLGDYVSVGISMLPDDVRDRTAEEIIALLTKAYQRRGLDYSAHFTCRREIVSLPTQHFIYERFTGKNWALVGGSGISTWFTSGSNLSIATLMSSIAPKIIQSPELYGEYYTTHVRGFAKTQTIYDAFMESNIGSVDALKFLSGVVEQARSRITSFFLLDEIEGKSSGKVARELWQENTAIDKEYFDFLRQIATHARPEDRQQQTDLIFQKLMQLESMEHQVRLPYLKDSKVRQEKPQLFI

SEQ ID NO: 7585 - protein, 2305 aa, Xenorhabdus sp.
MGEKCNVSDLNEFIEILMAEHSVDFNHDLFDQGMTSKSIMQVLIRIRERFDVNLDLDEFLHTPTMARLSHLICRQIENNQQDTGKPVVTGGSLQQLEQLMAGKALKPNQDLFEHGFSSLNVMELVLAVKKQFDVDIELEALLAKPTLETLAVLIDQQSGQPVARCEPQSVLPVADEEKELSVLSSLTEKQAFRERQFNIRQLDSNFDTVRAKKLSSEEFQHHYNTRRTFRTFDDAPMPKDSVLGWLSALNAMLIDGSHRYLYPSAGGTYSIQIYVEIKPGRVGGFSTGFYYYNPVEHKLDKISSDELPHNSHFYYNRPYYDNAHCCLYFVVEYDGIRPLYKEKSDFFAAIEVGAIVQLLAQKQAHYPIGSCLLSGVDETALAGVLKLKDSQRTLLGMAFGLVEKTQFQEPENSSTEMPGQDIAIIGVQGKYPDAPDIETFWNNLKDQKNCFSRVPDNRWGSPECSEHWGGFSHSITDFDADFFGISTTERERISAQEACFLTSVYELLDGAGYNGENLLSLGPRVGVFSGVMWNDPDGSAEETGISVESASRSTFSSIVNRVSWFFNWTGPSLAVDTSCSSSLTSIYLACQAIAQGDCDVAVAGGINLFAHATHFTNLKRFNMISERCDAQAFGEEAAGIIPGEGVGVVLLKPLSQAEADNDHIWGVIKGGSIAHSGRVSGYGVPSTKQQSELLNSTLQKTGYDADAVDYIEAAAAGTVFGDASEIRAIQTAFAERHTPLFVGTLKPNIGHLESASGISQLTKVLLQMKYGYLLPVMPYKTLSPLIKLDNSPVSIVTEQRQWQGTRQHPKLAMVNSFGSTGSYANLLLQSYHPSEQSLQNSSNISLPELFVLSAKSPDSLRRYAQCWVHFFESALKNNREIPLQQLFAVTQSGREHFNQRLAIPVSSVSELLKKLKRWIADGTGTDIYQGSISDAGIAEQESLFFNPEQNHKIADAWVKGQWQNWRQFHRDEPLPKMPLPVYPFYQSHQNSPLMTTQPSEPAIDHHLSTGNLPPSQDAGESSLSMKELLFSLIARILQQPLEQIDGSMSLFALGMSSSQAVKFVRMVELQTGMSLPIAILLEKNSVTELSDYLTAQYGEIQYGEIQTNDIATSEFQEPIQAVQTQANNVPVSVGQTRKPETYPLSEGQQGLWVLHKHAPQNSAYNCPVCFRVNGRIDPYLFQQALDLLVRRYPILATTVFEEEGLPYLFNNPQSALRVNVATELSLTEKELEAYLSEKISQPFDFDSDALLRVNLLYLSEKETIILLCAHHIVVDAISVNPMVSALFNFYHQLSVDKPPVVETGKDNWYDFVMHEQALLQSNEGKRRLDYWKKTLADAPVSTKLLADSSYLNVEKYKGETLTRTLSSHLSAKLKTFAGTHSVYLSSVFLSLFQLVSHRFTRQDDIVIGMPTDARTEEHQREEVGYYVYPIPVRSQLSQDISYPEYLRTLQQTVLDGLAHALPFPVLVRTLNLTQSMDDSPLFQMAFVYQQAMPQKESQALGKRISAEHLTQYSQTGEYEFMLEVVEAAETFTLNVKYNPSLYRQSTALSVVEHLVRLLQEVIEQPARKLIDFSLMDQKESVQIFEEWNRTAVNLGEACCVHELFEQQAAKTPEAVAVIFEDVTLTYQALNVKADQLACCLQELGVEAGTRVGICMERSVEMIVGLLGILKAGGAYVPLEPGYPSQRLAYILKDSGASVVLTQEQHKSIFTHFNGKLVFLNARRTELHSHHVLPNSVGNTPDNLCYVLYTSGSTGTPKGCMLPHSAIVNRLRWMQDKYRLNVTDNVLQKTPYSFDVSVWEFFWPLMSGATLVFAVPEGHKDPDYLIRLIREQQITTCHFVPSMLNVFINTRGSDKCVSLARIFTSGEALPYSVLERVNQKLQVKLHNLYGPTEAAIDVSYWEAEKRKDKKTLIGKPIANTQLYIVDDRMNLLPVGAPGELLIGGAGLAKGYLNLPELTANCFIPHPFSCDPTEKVYRTGDLARWSVDGNIEFLGRIDTQVKVRGFRIELGEIEECLKSCDGVKACAVLLKEDAHTGNFISAYVVLYQNVTLSIKELNAFLKQRVPDFMIPAQINILDELPVTSNGKLDRKALSALETIPLSDKEFIAPSSAIEQQLADIWRDVLNRTQIGTNDNFFEIGGNSLTAITLLSRVQDAFPENKLSLIPFYQAPTITEMMPYLSGMGSAEAANAEKGFLSLLHRSQEEEQITLVCVPYAGAAATVYQPLAQALAQKNAGYSVYGVTAPGNAFGSRHEETDMDYNMLAELCAREIVEHVSGKVAIYGHCVGSYLALEIARRLELKGTLGPL

SEQ ID NO: 7586 - protein, 46 aa, Xenorhabdus sp.
VNLRVSGSKNGFPIGTNIAVRQTGNRECQRKLRAPAQKPASLYRHL

SEQ ID NO: 7587 - protein, 502 aa, Xenorhabdus sp.
HDMQLVEKISRLSQYLESGLYERRQTIRLCLLAALCGESVFLLGPPGIAKSLIARRIKFAFQNARHFEYLMTRFSTPEEIFGPLSIQALKNEGRYQRLTEGYLPEAEIVFLDEIWKAGPAILNTLLTAINEKKFRNGNQEEQLPMRLLIAASNELPDANNGLEALYDRILIRLWLDNIQEKKSFHALLTDHCNENTNPVPDHFQITNEELDQWQDKVSHISLPIPIFELIYQLRQQINAMENTPHTSDRRWKKSIRLLQASAFFSGRNSISPLDLVLLKDCLWHDLNTLKLTPQLLHNLLTEQAYQQRSLTHKMEVLYQQWMKARQDETPHPPLQLTTKLSVFGHHTHYLLPENISGEKLTLFLSPSLILHDFAVNFIEVDKSHLEKSLKKNSDTLSVRLNGIGFPQKIPFEINKKNQIEMLDISRNSAVLCLSEQKQITLKKEQIQWKEKLLSIGDEIQHQHQLFSQNQPCLFIEPHWLADIEQSFSQLTEELKKLRSKMG

SEQ ID NO: 7588 - protein, 156 aa, Xenorhabdus sp.
VDTSGSMGGFNEHCAKAFCLALMRIALADNRQCHIMLFSTDIIHYDLTSQNGLTQAVNFLGQTFRGGTDLAFCLKTAIGKMETYIWKDADAVVISDFIAQRLSGDLIHQVQNLQQQHRFHAVSLSNYGKPGIMRIFDYIWRFDTGITSRLLRKWQH

SEQ ID NO: 7589 - protein, 153 aa, Xenorhabdus sp.
MAEIYQIDNLDRDILHALMDNARTPYAELAKKFAVSPGTIHVRVEKMKQAGIISGTRVDISAKQLGFDVCCFIGIILKSAKDYPAALQKLDMLDEVVEVYYTTGHYSIFIKVMCRSIESLQDVLINKIQTIDEIQSTETLISLQNPIMRTIKP

SEQ ID NO: 7590 - protein, 135 aa, Xenorhabdus sp.
MGSAEYVAEHMAEILDNLGFSTEVLHGPSLDDLPLNGLWIVVTSTHGAGDLPENLQPLADEIAQQKPDLSLVTFGAVGIGSSEYDTFCGAIRSLEQLLEDQQAKRIGDRLEIDILQHEIPEDPAEEWVKEWAKLL

SEQ ID NO: 7591 - protein, 641 aa, Xenorhabdus sp.
MQTSILTIEGSHMFYPEHFDVIIIGGGHAGTEAAMAAARMGRQTLLLTHNIDTLGQMSCNPAIGGIGKGHLVKEIDALGGLMAKATDLAGIQFRTLNASKGPAVRATRAQADRVLYRQAVRTALENQPNLIIFQQSVEDLIVENNTVTGVVTRMGLKFRAKSVVLTVGTFLDGKIHIGLENYSGGRAGDPPAIALSHRLRELPLRVSRLKTGTPPRIDARTIDFSQLEQQFGDNPTPVFSFMGNRDQHPQQIPCYITHTNEKTHEVIRSNLDRSPMYAGIIEGIGPRYCPSIEDKVMRFADRNAHQIFLEPEGLTSNEIYPNGISTSLPFDVQMQIVHSMKGMENARIIRPGYAIEYDFFDPRDLKQTLESKFINGLFFAGQINGTTGYEEAAAQGLLAGLNAARYATEEEGWFPRRDQAYIGVLVDDLCTLGTKEPYRMFTSRAEYRLMLREDNADLRLTEQGRELGLVDDLRWEHYSRKVEMIEQERQRLSNIWVHPHSESLDEINQVLKTPLSKEANGEDLLRRPEMNYELLTSMPRFSPGLAEPQAADQVEIQVKYEGYIARQLEEIEKQLRNENTVLPVDLDYKQVNGLSNEVVAKLNDHKPSTIGQASRISGITPAAISILLVWLKKQGLLRRSA

SEQ ID NO: 7592 - protein, 175 aa, Xenorhabdus sp.
MLNKWNKAYNLTSVRDPEQMLVRHIMDSIVVNPFLQGTRFIDVGTGPGLPGIPLAIVRPDSHFTLLDSLGKRVRFLRQVQHELGLTNVEPVQSRVEEFTPEVLFDGVISRAFASLQDMLSWCHHLPKDTDGRFYALKGIVPEEELTHLPSGISLDAVIPLQVPEQEGQRHLVVLK

SEQ ID NO: 7593 - protein, 125 aa, Xenorhabdus sp.
MSVSLYSGKIALKLLLLQLMTFVILSAAFYTRSIEWGVSAFAGGLAFWLPNVIFMLLTHFQKVKEEGVPVRIAWFFAIGEGVKVITSIAMLIVALGVFKAAFAPLGVAYLAVLIVQIIAPAVMNG

SEQ ID NO: 7594 - protein, 201 aa, Xenorhabdus sp.
VPGKFQTAVEMIIGFVDNTVRDMYHGKSKVIAPLALTVFVWVFLMNALDLLPIDFIPLIGEHVFGLPALRIVPTADVSVTMSMALGVFVLILFYSIKMKGIGGFAKELGLQPFNHPLFIPINLILEGVSLLSKPISLGLRLFGNMYAGELIFILIAALLPFWSQWMLSLPWAIFHILIITLQAFIFMVLTIVYLSMASEEH

SEQ ID NO: 7595 - protein, 76 aa, Xenorhabdus sp.
MDLLYIAAAILMGLAAIGAAIGIGILGGKFLEGAARQPDLIPLLRTQFFIVMGLVDAIPMIAVGLGLYMMFAVGTK

SEQ ID NO: 7596 - protein, 127 aa, Xenorhabdus sp.
MAAIEKRQKEIADGLASAERAKKNLDLAQANATDQLKKAKADAHAIIEQANKQRAQIIDDARTEAELERSKIVAQAHAEVEAESKRVREELRKQVALLAIAGAEKIIERSVDEAANSDIVDKLVAEL

SEQ ID NO: 7597 - protein, 147 aa, Xenorhabdus sp.
MLAFVAEVTRNEQVGELLSGSLAPETLANTFITLCGDQVDEHARNFIRVMAENGRLLVLPEVFLQFIQLRASLESTIDVEVISASELNEQQQAKISAAMEKRLSRKVKLNCKIDKSVIAGVIIRAGDMVIDGSIRGRLDRLTDVLQS

SEQ ID NO: 7598 - protein, 513 aa, Xenorhabdus sp.
MQLNSTEISELIKQRIAQFNVVSEAHNEGTIVSVNDGIIRVHGLADVMQGEMIALPGNRYAIALNLERDSVGAVVMGPYADLAEGMKVKCTGRILEVPVGRGLLGRVVNTLGEPIDGKGAVEHDGFSPVEVIAPGVIDRQSVDQPVQTGYKSVDAMIPIGRGQRELVIGDRQTGKTALAIDAIINQRDSGIKCIYVAIGQKASTIANVVRKLEEHDALKNTIVVVASASESAALQYLAPYSGCAMGEYFRDRGEDALIVYDDLSKQAVAYRQISLLLRRPPGREAFPGDVFYLHSRLLERAARVNAEYVEKYTNGEVKGKTGSLTALPIIETQAGDVSAFVPTNVISITDGQIFLESALFNAGIRPAVNPGISVSRVGGAAQTKIIKKLSGGIRTALAQYRELAAFSQFASDLDDATRKQLDHGQKVTELLKQKQYQPMSIAQQALSLFAAERGYLEDVEIAKVVSFESALLAYASHEHADLLKEIDQSGDYNGEIEAKLKALLESFKATQSW

SEQ ID NO: 7599 - protein, 287 aa, Xenorhabdus sp.
MAGAKEIRTKIASVQNTQKITKAMEMVAASKMRKTQDRMAASRPYADTIRSVIGHLALGNLEYKHPYLEERDVKRVGYVVVSTDRGLCGGLNINLFKKLLIEMKDWSDKKVQVDLALIGSKAVSFFSSVGGNVVAQVTGMGDNPSLSELIGPVSVMMQAYDEGRLDKLYIVTNKFHNTMSQVPTITQLLPLPAGDDETLKKKSWDYLYEPDPKALLDTLLRRYIESQVYQGVVENLASEQAARMVAMKAATDNGGNLIKELQLVYNKARQASITQELTEIVSGAAAV

SEQ ID NO: 7600 - protein, 460 aa, Xenorhabdus sp.
MATGKIIQVIGAVVDVEFPQDSVPKVYDALEVKNGEEKLVLEVQQQLGGGIVRCIAMGTSDGLRRNLEVTDLGHPIEVPVGEATLGRIMNVLGDPIDMKGDIGEQERWSIHRTAPSYEELSNSQELLETGIKVMDLICPFAKGGKVGLFGGAGVGKTVNMMELIRNIAIEHSGYSVFAGVGERTREGNDFYHEMTDSNVLDKVSLVYGQMNEPPGNRLRVALTGLTMAEKFRDEGRDVLLFVDNIYRYTLAGTEVSALLGRMPSAVGYQPTLAEEMGVLQERITSTKTGSITSVQAVYVPADDLTDPSPATTFAHLDATVVLSRQIASLGIYPAVDPLDSTSRQLDPLVVGQEHYDVARGVQSILQRYQELKDIIAILGMDELSEDDKLVVARARKIQRFLSQPFFVAEVFTGSPGKFVSLKDTIRGFKGILNGDYDHLPEQAFYMVGTIEEAIEKAKKL

SEQ ID NO: 7601 - protein, 137 aa, Xenorhabdus sp.
MTFSLNVVSAEKLMFEGLVQKIQVTGSEGELGIYPQHTPLLTAIKPGMIRIVKQFGEEEFIYLSGGILEVQPNGVIVLADTAIRGKDLDEAKVLEAKRKAEEHVRNSHGDVDYAQASAELSKAIAKLRVIELTKKLM

SEQ ID NO: 7602 - protein, 452 aa, Xenorhabdus sp.
ILAAGKGTRMYSDLPKVLHLLAGKPMVQHVIDTAMALGTLNVHLVYGHGGDLMKQTLSGQKSANQNLNWVLQAEQLGTGHAMQQAAPHFADDEDILILYGDVPLIAQDTLERLIEAKPEGGIGLLTAILDNPTGYGRIIRENGEVTGIIEQKDATDEQRKINEINTGILVANGGDLKRWLSKLENNNAQGEYYLTDVIALAHQEGSQIKAVHPSRLSEMEGVNNRLQLSALERIYQSEQAEKLLLAGVMLLDPARFDLRGTLEHGRDITIDTNVIIEGHVVLGNNVQVGSGCILKNCVIGDGAVISPYTVIEDSELAAECTVGPFARLRPGSKLAEKAHVGNFVEMKKSSLGKGSKAGHLTYLGDSEIGSNVNIGAGTITCNYDGANKFKTIIGDDVFVGSDSQLVAPVNIAKGVTIGAGTTVTKDVAENELVISRVKQTHIRDWKRPVKKK

SEQ ID NO: 7603 - protein, 609 aa, Xenorhabdus sp.
MCGIVGAVAQRDIAEILIEGLRRLEYRGYDSAGMAVVDSENQMTRLREVGKVQMLADEADKQPVIGGTGIAHTRWATHGEPNERNAHPHVSEHIAVVHNGIIENHEELREELKARGYGFSSDTDTETIAHLVHWEQQQGGSLLEIVQRVIPQLRGAYGTVIMDSRQPDVLVAARSGSPLVIGLGVGENFLASDQLALLPVTRRFIYLEEGDVAEITRRTVRIFGVQGEAVEREQIESNVQYDAGDKGVYRHYMQKEIYEQPMAIKNTLEGRVSHGEIILSELGANAAELLSQVEHIQIVACGTSFNAGMVSRYWFESLAGIPCDVEIASEFRYRKPACRKGSLLITLSQSGETADTLAALRLSKELGYLTSLTICNVAGSSLVRESDFALMTKAGAEIGVASTKAFTTQLTVLLMLVAYMGRLKGADDSLEQNIVHALHALPSRIESMLSKDKVIEALAEDFSEKHHALFLGRGDQYPIAVEGALKLKEISYIHAEAYAAGELKHGPLALIDADMPVIIVAPNNELLEKLKSNIEEVRARGGQLYVFADQDAGFTDSENMKIISLPHVEELIAPIFYTVPLQLLSYHVALIKGTDVDQPRNLAKSVTVE

SEQ ID NO: 7604 - protein, 291 aa, Xenorhabdus sp.
MNNLVEIFIDVDDFCRFFIPQWEQFCLNKGYRLRRRKGHMYPSEIMTILILFHLSHYRDFKNFYLEHIWRYHHHDFPTLLSYTRFISVAPSVLVPLCSYLTQPTGIAFIDSTRLSVCHNIRIPRHKVFEGTAQRGKTSMGWFYGFKLHLIINHLGEILALKITAGNTDDRKVVRELAKELIGSLYGDKGYLSQELANDLAQNGVTFITKKRSNIKASVLEDWDKIMLSRRFIIETVNGQLKNICQIEHSRHRSIKGFLLTVLTGLIAYCHKKKKPSLKVFYSEEEDIPVTA

SEQ ID NO: 7605 - protein, 518 aa, Xenorhabdus sp.
MEPLLELSGIDKSFPGVKALSGATLRVYPGKVMALVGENGAGKSTMMKVLTGIYTKDAGSIRYLGKDVVFSDPKASQEAGIGIIHQELNLIPQLTIAENIFLGREFVNQLGIINWKRMYKEANYLLKKLNISSNSHRLVSELSIGNQQLIEIAKALSFQSKVIIMDEPTDALTDTETESLFQIIRELKAQGCGVVYISHRLKEIFEICDDVTVFRDGQFIGEQPVCTLKEDSLIEMMVGRKLEEQYPRLGLLRGKKRLEVVNLSGSGIKNVSFSLNRGEILGISGLMGAGRTELMKVIYGALPKIEGEIRLDGNTLIIRNPQEGLSNGIVYISEDRKSDGLVLGMSVKENMSLTALRYFSRTPCRLCHSAEQKSVSDFIKLFNIKTPSMEQPVGLLSGGNQQKVAIARGLMTRPKVLILDEPTRGVDVGAKKEIYELINQFKKDGLSIILVSSDMPEVVGMSDRILVMYEGSISGEFSSDNLSQESLMAAAVGKQYTPDNLFQNELTVSNTTQCSNSG

SEQ ID NO: 7606 - protein, 141 aa, Xenorhabdus sp.
MKKGVLLNSDISAVISRLGHTDQIVISDAGLPIPSSTQRIDLALTQGIPDLLSVLDVVVQEVQVEAEATILAAEIIEHNPQVHEQIIKCITEIEIKQGNTITIEYVSHHILKEKTEKSKAVIRTGECSPYANVLLCSGVIF

SEQ ID NO: 7607 - protein, 330 aa, Xenorhabdus sp.
MKTSFIEKQQQISFVKSYFSRLLEKQLGLIEVQGPILSRLGDGTQDNLSGHEKAVQVKVKTLPDATFEVVHSLAKWKRKTLGRFGFQAEQGLYTHMKALRPDEDRLTPIHSVFVDQWDWEKVVGEGCRSLDYLKQTVGKIYEAIKETQQAVSKEFGLAPFLPDQIHFMHSEELLKRYPDLDAKGRERAAAKEFGAVFLMGIGGKLSDGQAHDVRAPDYDDWTTTNSDGFLGLNGDIIVWNPVLQDAFEISSMGIRVDAEALERQLALSGDEDRLQYDWHQSLLKGEMPQSIGGGIGQSRLVMLLLQMAHIGQVQCGVWSPEVIESVEGVL

SEQ ID NO: 7608 - protein, 310 aa, Xenorhabdus sp.
MDSVSKQRAEVLDDIAQVAAINPNLTLDEINAVTQHKINEHNNRPNTDFCGLSPNQMSNWMHAPFGQFSWVTINTPVDLSSSPVMRYLGLILDEAMQNEGSFKATTKGNLPLKLVKQACDLLPEFPVAKFDTPISIHEFSGSNEDKFNALHYSRVLAEITGIIYRRSGRYYVKKDAQKQYQTHGINAFFLPMLEAATTQYNWGYLDSWGDIDIRTFWLFMLWRLQSHGSVDQLSDEVATAFPALLDQFIPNKLFSPTESLTMVIESRFIARFLQFWGFITIESRWVPIENPSSRKADILPLLTQTFQFAV

SEQ ID NO: 7609 - protein, 72 aa, Xenorhabdus sp.
MKPKKGTSHEQWIKKADGHKWVVTVDKSHAPFSRDLIKSMAKQAGISSKKFHSLCKGTISCDEVLASGLSRD

SEQ ID NO: 7610 - protein, 99 aa, Xenorhabdus sp.
MAYQQDNIFIAACLDLSLAAQADSIDEAINKLEAQVNDYLEEAASEREYAKQLINRKAPLSMWLKYWYIAFKLKVRKSFYPNNEIGSVKLFDEQCELAR

SEQ ID NO: 7611 - protein, 132 aa, Xenorhabdus sp.
MIEGEWQLLPDNRGKTIYNITTRHSALCQEVIIPDGYTLLAPVTRFDYWNGQQWVTDKGELAAYERQVAESEKQYLLWIATEKIAPLQDAVDLDMATKEEKAALLKWKKYRVLLNRVDCSTAPDIVWPEQPE

SEQ ID NO: 7612 - protein, 259 aa, Xenorhabdus sp.
MSNLGAYPQTGGRLNGGIQATGTITSQQRMVVDSDNGFSGLELVNKDISLIFETDGKKGGYILARERESPWQNIWSVTIPERSGVIALLSDLAGFEKLEVGDWKFSLRRENELKPGWYVMNGDRFNINSPQGKAIRSLSSQVRADWRVVERDGNINLPSMKHSDGRWHYPRAGLTPGQVAQDGIRNISGLFSIGAEVARGLTKAGGAFELSVKDDMVASQVYLSRPYATYEFSADKVVPTAPENRVLEVTLVPIIYLGV

SEQ ID NO: 7613 - protein, 649 aa, Xenorhabdus sp.
MIVFSSLQIRRGVRVLLDNASATINPGQKVGLVGKNGCGKSTLLSLLKGELQAENGSVTFPGNWALAWVNQETPALEISALEYVIDGDREFRQLEQKLKIANEQNDGHAIAHLHGQLDTIQAWTIRSRASSLLHGLGFSQAQLEQPVRSFSGGWRMRLNLAQALICRSDLLLLDEPTNHLDLDAVIWLEKWLKSYTGTLILISHDRDFLDPIIDKILHIEQQNLFEYTGNYSSFERQRVAKLAQQQALYQSQQEKVAHLQSYIDRFRAQATKAKQAQSRIKMLERMELIAPAHVDNPFRFSFRKPDSLPNPLLNMEKISAGYGDKTVLDSIKLNLVPGSRIGLLGRNGAGKSTLIKLLAGELEPQQGEIALAKGIKLGYFAQHQLEFLRADESPLQHLARLAPQESEQQLRDYLGGFGFKGDQVTDPSARFSGGEKARLVLALIVWQRPNLLLLDEPTNHLDLDMRQALTEALIDFDGALVVVSHDRHLLRSTTDELYLVHDGKVEAFTGDLEDYQQWLTELQRQQLRESQEEKNATGTDSSTNNAQNFSAQERKDQKRREAEFRSQTQPLRKRLTVLEKQMEKLSTELEKIEEKLSDNTIYENDRKTELTECLYQQNNTKSKLEDIEVEWLDIQEKIEKMTETFNSNQ

SEQ ID NO: 7614 - protein, 301 aa, Xenorhabdus sp.
MKINLNNLITEGRNPASTHIDELSTLDMLRVINDEDKKVALAVEQTLPQIALVVDKVAEAFRRGGRLIYCGAGTSGRLGILDASECPPTYGTRPEQVVGLIAGGHKAILKAVENAEDNRQLGTDDLKELHFSEKDVLVGIAASGQTPYVLGAMEYAVSIGATVACISCNPDSPITQLADIAITPIVGPEVVTGSSRMKAGTAQKLVLNMITTGAMIRIGKVYSNLMVDIEATNAKLIERQKNIVMAATGCNRETAEQALSACNGHCKTAIVMILSGISAEEARMLLTEHQGFIRPAISTVR

SEQ ID NO: 7615 - protein, 482 aa, Xenorhabdus sp.
MAKINPNMLPEILSAIGGASNVIQCGNCMTRLRLTLRDDSIVDKAKLKLIPGVLGVVESNEQLQIVLGPGKAQTAAEMMNELLSSAGHPAPEHHSADLKDIASSNKKHLKEKQTSSIHKFLAKFATIFTPLIPGFIAVGLLLGIATLLEQIFIQGVAQPNAVLVEMIGYMKIFSKGMFTFFSILIGYNAQKAFGGSGINGAIIAALFILGYNPDATSGFYSGISNFFGFAIDPRGNIIGVLIACILGAWVEKQIRKIIPADLDMILTSAITLLIMGAVTFIVIMPIGSYLFTAMSWLFTNLNGNPFGTAVLAGLFLIAVMFGVHQGFIPVYFALVETQGFNSLFPVLAMAGAGQVGSALALYARAKKDSLLRIQIKGAIIPGFLGIGEPLIYGVTLPRIKPFVTACFGGAIGGFFIGLIAWLGVPVGLNTVFGPSGIVALPLMTSLTGIFTGMAVYGAGLIVAYISGFVLTFFFGSKNIDLS

SEQ ID NO: 7616 - protein, 72 aa, Xenorhabdus sp.
MIIPWKQIEPDTLRNLIESFVLREGTDYGESEKTLEQKVQDVKRQLERNEVILVWSELHETVNIMPKEQFRP

SEQ ID NO: 7617 - protein, 289 aa, Xenorhabdus sp.
MSAKHPVIAITGSSGAGTTTTSVAFRKIFQQLGITAALIEGDSFHRYTRPEMDAEIRKAKEQGRHISYFGPEANDFQMLEKAFSDYGETGAGRWRKYLHTYDEAVPYNQVPGTFTPWEPLPSNTDMLFYEGLHGGVVTPQHNVASCVDLLIGVVPIVNLEWIQKLIRDTSERGHSREAVMDSVVRSMDDYIRYITPQFSRTHINFQRVPTVDTSNPFSAKAIPSLDESFIVIRFRGLSQIDFPYLLAMLQGSFISSINTIVVPGGKMGLAMELIMAPLVQQLLEGKKIS

SEQ ID NO: 7618 - protein, 210 aa, Xenorhabdus sp.
MVLGKPQTDPTLEWFLSHCHIHKYPSKSTLIHQGEKAETLYYIVKGSVAVLIKDEEGKEMILSYLNQGDFIGELGLFEEGQERTAWVRAKSACEVAEISYKKFRQLIQVNPDILMRLSAQMASRLQTTSEKVGNLAFLDVTGRIAQTLLNLAKQPDAMTHPDGMQIKITRQEIGQIVGCSRETVGRILKMLEDQNLISAHGKTIVVYGTR

SEQ ID NO: 7619 - protein, 67 aa, Xenorhabdus sp.
  unsure (1)..(67): unsure at all Xaa locations
MSVSRKRXYCRSRLSKVSVTGYFGYPHENKVDVVEYVSCGHLQRQTDESVTAHVRDQEQVIGIFTPK

SEQ ID NO: 7620 - protein, 599 aa, Xenorhabdus sp.
METSALLSAGILFLFAAVVAVPLAQKFRIGAVLGYLLAGIALGPWGAGLIKDVGEILHFSELGVVFLMFIIGLELNPAKLWQLRRSIFGAGTVQVVLTALVLASFLCLTNFSWQAAVIGGVGLAMSSTAMALQLMREKGMANNEGGQLGFSILLFQDIALIPALALIPILAGGTASGDWYRIGLKIIAFAGMLLGGRYLLRPLFRLVVKSGVREVFTAAALLVVLGAAVFMETLGFSMALGTFIAGVLLADSEYRHELEISIEPFKGLLLGLFFISVGMSLNIGVLLSHLPDVLLAVLALVLTKSSILYVIGRISGLGNSLGMQLSGVLSQGGEFAFVLFSAALGEKVLDKNQMSFLLVVVTLSMMTTPLVMTLVDRILTGRYNRQPESNETPFVEDNAPQVIVVGFGRFGQVVGRLLMANKIRITVLERDVSAISTLRRYGYKVYYGDASELELLRSAGADRAKAIVITCNEPEDTMTIVRLCQQHFSHLHITARARGRFEAHELLQSGVQDFSRETFSSALEVGRKTMIGLGIHPHCAYRAQQHFRRLDMRMLRELMPHLQGDVAHISRVKEARRELEELFEREMLNERRQPEGWDE

SEQ ID NO: 7621 - protein, 179 aa, Xenorhabdus sp.
PPRVLLLYIHPEPQGSVVNKVLLQTVRELENVTVHDLYGCYPDFFIDVPAEQKLLSEHQIIVFQHPLYTYSCPALLKEWMDRVLSRDFIGGTEPMLRNKYWRSVITTGEPEGAFCSSGHNRYSMEEILRPFELVASMCHMHWLSPMILYWARRQPPEVLVSHANAYWEWLKAPLSLGGL

SEQ ID NO: 7622 - protein, 154 aa, Xenorhabdus sp.
VAVMPLAAAKSFDVKKIFTEKLVYIFKKKSPLISKFRIGNSQYGSKNSLTMASEKKENTDLNDCLNVFPIYSSDNMNLLLKTNDIMLMMEMITKNGTYTCVPKRMISAIPDYYMNSLELFETDKKIDLGVVWSKTIDEELIGDAESFSAWVINL

SEQ ID NO: 7623 - protein, 278 aa, Xenorhabdus sp.
MDVPVFAHISMYDTLTAHFRPAHGGGTIDGGSLVVYRTNMSDYDISTQASLVPVGEYYAYYTVTSVAQPSEPIPSPPVYVKIIDSVSDTPIVVYSSFGVNPDNILEQYQPVCGNETANNVINCYTLSNYKNNKVVDGSAGDMSRAALFVVVNKNRLAPSDSSVTLRMEIDACLGRDGTYGPIYMSPDSDHVTFSIPYYDVTGAFKRGDCRINGGPQFGYGSIQFTFYAKPQPNYLSDPWQGRIITCGSAYQGCSGPGCPDHSYDCPDCSTNCPDYPNG

SEQ ID NO: 7624 - protein, 72 aa, Xenorhabdus sp.
MISFTPDNDNKRESTTIIKIPYEMLVDIEPYPESKEPPLIYFEYYVDTQGIRAYSQYWEAKISTVAPQSKYL

SEQ ID NO: 7625 - protein, 1299 aa, Xenorhabdus sp.
MNAFAEGYVTNEKTSTSKIDNVDTRVTESSKKLLTPEADKKDGTGITSNKPEYEHADAIGRNIQMAGNILSSSSSELAEQAKSYALGKVNSTISSEAQKWLSQSGTAKINFGFDRKGRLENNSIDLLLPIYDNQAAWLFFSQLGYRNKDSRNTVNLGLGGRYFSPNWMYGLNTFYDYDITGKNRRVGLGGELWGDYIKFSTNGYYRLSDWQISRNFEEHHERPANGYDINGEFFLSAYPNLGGKFSYEQYFGDNVTLFNRKTKQKNPSLAKMGVTYTPIPLITMGVDYKQGERGQSETQLLTNFNLRFGVPLSAQLSPDNVASMRTLAGSRYDLVERNNNIVLEHREVPKSELSVPGIIVGYSREIHDITKELSANTAIQQINIEKGNAKEEFIKNGGDIYLNSGRIYIKFPEYLSDENENNSYSLNLSAELKNDQKTKPQQMKVIVRPFEIKKGDGVNFTPPGPLSASGDQGYTFNPIITFDTPNNLNVIKNATIHNVEWFAIPVGASALAVATGTSTASLTLDDNICKNKEITDKLEFKPNSSFKQIKIMDDGHIAESDRVTLMSTGYVGAVAVCVAMDGQPKKIIGKKVVVFDAKPKSYRIKEITVTPEKIITADGKQFYTYTAQVVDNENHPLQKKTKISGVEWDIKNPVTGLTLDAPKGDVETDETGKLQAKLTSAVKVDDVMVSLAIEGLAPVDARAVSFKLENIIVKHDCNNELLVFDTCKYTAKVTNSDSNPEKGTVTWKLKKNINGVCLNPAENGTCPTPPVESVKTVIGADGTATIKLKSEVAASDVIVTASTGGNTEEAPPVEFKWPTISKPIFDPFILNNKNNTAPSGGSYALISMVSGIDGKPYMGQEINFEWSITEPENSGLSLLPFGAVQVDSEGKLRAKLQSAEDKPAVTGIKVCVNIVNVSESQQCITDVNFVDPPVDFEIASIEVYGTYDANGNFTEGSYNPDKKLTADGKSAYAYRAKIIKKNTTEPLPYHEFHSVIWSRSGSHGDIDTSDVPNPIFESKKTTKDGYLYSTLRSNAGIDNIKMELEIKNSDYKDNKSTDEKNLVSFKNLPRPVKLRLFSQGGGATPVFAKEGGPYNFFNSLRGDLREYLDKPLVNKKPGDTLKYDIDPEPTAWSSIVSFADKEKGIIKFDSTGTAKITANFTKASGANYVYEYSVTLGRYFLSVSHQYPEAYPINDNHYCEMITVDGSPLISPGRADIISTGSTSGLSTEFPDAFAWGLLQGYSKVTPESARIKVRKSQGGTVEPSDFTIYDAAKGCFLSDSGCSSDTSVDDAYVICAEY

SEQ ID NO: 7626 - protein, 783 aa, Xenorhabdus sp.
MNTFSVSEDHQNLTVKPLFPSTSDENNLDVTEKDKAGVIAQNIQTIGGLLSSSSSQLTEQAKSYALGRVNGVINSEVQEWLSQFGTARVNLSLDRKGKLHNSSLDLLFPLYDNKIDWLVFSQLGYRNKDSRNTVNLGFGSRYFTSGWMYGFNTFFDQDITGKNNRLGLGAEAWADYLKLSANTYIRLSKWHQSRDDKDWEERPANGFDINGEFFLPAYPHIGSKLGYEKYFGDNVTLFNRDTKQKNPGFAKVGITYTPIPLITMGIDYRHGSNKHSDARFQANLNYRFGVPLSVQLSPDSVASMRTLAGSRYDLVERNNNIVLDHREKPRLEISLPNIKHGKSGSDISVTADVISNSATKPVTWRAGGDFSKNGGELPSNGNPINIKLPKYIDKGVNSYPIYATVELKNGKLSKTAKMTIEVEPFDPEGKPFKGQLEVSPPEDTLFGNGNDAYTYKILVIDPKSGQPLRNHSFDNVTWSITESHPGQKIPNNVKLKDSKITTDSNGYLTTSLVSDVGVDKVRVSLALTTDDKKVHKIDAQRDVSFKAVPQIADLMLTSDNQHFTYVEGPNKPYNVYKGLKIIFTKKVSSLEDMPEPIARHNDYVEYKSPSDLVKIVMTTQGPEITFPIEGFSPSKKATVTATVTEFDTGAKYSYEYKFNPQRYVFVPEVGNNGDVKLGDDKYNKELNHTCENLDSASRKSRSMTKEDVAGKGSFSLKNEYYMFTGFGVLPHDDKMKVINDGDQKFILYYFVPKIDEYGVEDRINGEDKIDTNPEHTGKLLCKL

SEQ ID NO: 7627 - protein, 200 aa, Xenorhabdus sp.
MTASLLFSLSTFMFISAITPGPNNMLMTTSGANFGFRRSLILFLGMIIGMQTILLLSAFGVAALLLVYPAVHTGLKVLGSLYLLWLAWKTVTTQYKQLDAQSLGTPLKGYQGWLLQFLNPKAWMMGLGSVSSYSLAGDLYIHSIWVISVVMILSNIATGLVWLNFGVMIGRLLKGRTAWFTFNIVMGLLTAACVPLIWIS

SEQ ID NO: 7628 - protein, 394 aa, Xenorhabdus sp.
MTLATNISLLSKLGAIPLQRNHATLQSTSADSTLLDKNKQLSPAITSRSENTKQADSLYQSLITASQNRVMDTPELKANDIAGKHSKFIDYALAQVTRDVYRRNSFGIGDYVRMSDEELIKAGIDPDTLDDRSTGFQAGVYRNKGLYIVSFTGSNEIKDFMASIRQGLGYNEAQYNQAVDLAKSALKAFGENVIFTGHSMGGGLASMAALTTGKPAVTFNSAGVSDWTLKRMGWSPGAGREMAEQGLIRNYIVEHDWLDNLQKALPIPQPMGSQILLEYEYKPENFIDSIVRYSYALHSFKAHFLEAVQELMVIHRPWPGKEDNKEYGKESVMMAAAGNDIKDNIIASNKASSLQTWAVDMSDDELGVLFSQSYQHTNLQPQLSKERVEKYYSA

SEQ ID NO: 7629 - protein, 196 aa, Xenorhabdus sp.
ESEPRMSEQLTDQMLVERVQKGDQKAFNLLVIRYQHKVASLIARYVPQGDVPDVAQEVFIKTYRALSSFRGDSAFYTWLYRIAVNTAKNYLVAQGRRPPSNDLDANDAENYDTSSSLKEISNPENLMLSEELKKVVFRTIESLPEDLRIAITLRELDGLSYEEIAVIMDCPVGTVRSRIFRAREAIDNKVQPLIQQ

SEQ ID NO: 7630 - protein, 217 aa, Xenorhabdus sp.
MQREKLSALMDGEALDSEIVRLISEDAEMQKQWERYHLIRDTLRGDVGEVLHLDIASQVAQALEKEPVHINPAAIPESQPKPDTWQKLPFWHKLRPLVTRPWASQITQVGVAACVSMAVIIGVQQYNGSDTDAQLDNPVFNTLPVMGSASPVGLSVPAEHDAFGGDLSTQVRESNKRIDAMLQQYELFRRINAENEQGLPEVNAIHSGEQRPVISNK

SEQ ID NO: 7631 - protein, 311 aa, Xenorhabdus sp.
LLFGSFLNLSKASVQQKNSTEALLQGMGHSVQTLPYELAFINLSQQFIIPLRYRHVIIDNQPIAQLIQMDNTRREIIQRGHQISYYESGLDSFSLRGNHIVDYLPPIIFADFSQIQKFYNFIDAGSTHVGDRPVYFVRITSKDNDRYNYNLLIDKKSYLPLLIELFDQEKMVVVEQFRVISSRVNDDIKQELNAIVNLKLPPMLVIPKAEKVAFNWKVSKLPEGFREVSRNRNRLSKTELLESIMYSDGVFSFSVNVVNAGAKAADEPLYRQGRRTVYTVSNGRHSISVIGELPFATIKQIAGSVTFTGDN

SEQ ID NO: 7632 - protein, 154 aa, Xenorhabdus sp.
MVKEWATVVRWQQGRAVLRYGSSSGCGSCQAKTACGSYLLEKLGPENIHQLELEIAQPLQPGQKVEVGIPESSLLRSAMLVYLTPLLGLFLGGLLSQYWTTEQLWVCVGGIAGGLAGFAFARKIAAYWDNQQAYQPVVLQIGLPPDTIKVLHQE

SEQ ID NO: 7633 - protein, 597 aa, Xenorhabdus sp.
MKQIRNFSIIAHIDHGKSTLSDRIIQICGGLSDREMAAQVLDSMDLERERGITIKAQSVTLDYKAHDGNVYQLNFIDTPGHVDFSYEVSRSLAACEGALLVVDAGQGVEAQTLANCYTALDMDLEVVPVLNKIDLPAAEPERVAEEIEDIVGIDATDAVRCSAKTGVGVQDVIERLVKEIPAPEGDPEAPLQALIIDSWFDNYLGVVSLVRVKNGTLRKGDKIKVMSTGQVYNADRLGIFTPKRIDRDVLNCGEVGWLVCAIKDILGAPVGDTLTTARHPAEKALPGFKKVKPQVYAGLFPVSSDDYEAFRDALGKLSLNDASLFYEPESSTALGFGFRCGFLGLLHMEIIQERLEREYNLDLITTAPTVVYEVETTSDEIIYVDSPSKLPPLNNIKELREPIAECHMLLPQEYLGNVITLCIEKRGVQTNMVYHGNQVALTYEIPMAEVVLDFFDRLKSTSRGYASLDYNFVRFQHSDMVRVDVLINGERVDALALITHRDNSQYRGRELVEKMKELIPRQQFDIAIQAAIGTHIIARSTVKQLRKNVLAKCYGGDVSRKKKLLQKQKEGKKRMKQVGNVELPQEAFLAILHVGKD

SEQ ID NO: 7634 - protein, 324 aa, Xenorhabdus sp.
MANTFALILTFATLITGIIWCIDRFKLAPERKRKLAQAQKQAAGNESQEAAIKEINKPTWAETFASVFPVLAIVWILRSFVYEPFQIPSGSMMPTLLIGDFILVEKFAYGLKDPITQTTLIKTGEPKRGDIAVFKYPVNPSIDFVKRVIGLPGDKIVYNYWDKELQIYPGCGYAQHCKDILPITYGDVYLSDWTISEKIKKDGTITNEVHQIPVGQTLGPRTLRQGERVETLGDVSHHILTLPPQREPEFVQEGQPVGTWVVPKGEYFMMGDNRDNSSDSRFWGFVPEKNLVGRATAIWISFNKQEGEWPDWPWVRFSRIGGIH

SEQ ID NO: 7635 - protein, 226 aa, Xenorhabdus sp.
MNSIIMNRLQRKLGYTFKQNDLLLQALTHRSASSKHNERLEFLGDSILSFVIANALYHRFPRVDEGDMSRMRATLVRGNTLAELAREFELGECLRLGPGELKSGGHRRESILADSIEALIGGIFLDSDIQTVEQIVLNWYESRLNEISPGDKQKDPKTRLQEYLQGRHLPLPSYLVVQVRGEAHDQEFTIHCQVSGFEQPVRGIGSSRRKAEQAAAEQALKQLELE

SEQ ID NO: 7636 - protein, 213 aa, Xenorhabdus sp.
VELVIFVVEGTHWTPDDEMVVNKLRDLRCPVMLVINKVDNVTDKTILLPHIGFLSQQMNFIDVVPISAEKGTNVDTIAKIVRERMPEAEHHFPEDYITDRSQRFMASEIIREKLMRFLGEELPYSVTVEIEQFVTNERGGYTIHGLILVERDGQKKMVIGNKGSKIKTIGTEARQDMEKLFDVKVHLELWVKVKAGWADDERALRSLGYIDDL

SEQ ID NO: 7637 - protein, 243 aa, Xenorhabdus sp.
VDGWQRAFVLHGRPYSETSLLLDFFTEHEGRVRVLAKGARSRRSNLKGCLQPFTPLLVRWSGRGEIKTLRDAEPISLALPLTGSVLYSGLYVNELLSRVLEQGTAYPVLFFDYLQCLQVLAASEYTPEYALRRFELSVLNNMGYGVDYLHCAGSGEPVTDTMTYRYREEKGFIASLVVDHYSFTGNELKALAAREFPDPATLKAAKRFTRIALQPYLGGKPLKSRELFHQFVRRNTGNTNQKN

SEQ ID NO: 7638 - protein, 243 aa, Xenorhabdus sp.
MAEVLLGINIDHIATVRNARGTQYPDPVQAAFVAEQAGADGITVHLREDRRHITDRDVQLLAKTIQTRMNLEMAVTDEMVEIACQIKPAFCCLVPEKREEVTTEGGLDVFGQKAHVGAAVKRLSDAGILVSLFIDADHQQIDAAAEVGAPYIEIHTGAYADAENDAQQEKEFQRIKEAVTYAAAKGIKVNAGHGLTYHNVQRIAALPEIYELNIGHAIIGRALFSGLSAAVSDMKTLLREARR

SEQ ID NO: 7639 - protein, 70 aa, Xenorhabdus sp.
MSNTMTGTVKWFNNDKGFGFISPKDGSKDVFVHYSAIQSNSFKSLDEGQEVSFTIENGMKGPAAANVVIL

SEQ ID NO: 7640 - protein, 266 aa, Xenorhabdus sp.
VQLDQVKKGIIWHGNPALLTISMEKNRAQVQLDIDGDSASYSKDALSVLANHMLGLFQPVEIFEEKYQENPVIGELITRQAGLRIYQSASPFEALSWAIIGQQISVSAAVSIRRRFIQAFGIKHTSGLMCHPTHKEVMQFTEQDLYQCGFSMGKAKALLNVCQLIDSGELDLSIETDEAEISRLTKNLLAIKGIGIWTVNYTLLRGLNYLNGSLHGDVAVRRNLQYLLKQENKVDAEQTEKWLAGFSPWKALVAAHLWRQQSSSGY

SEQ ID NO: 7641 - protein, 192 aa, Xenorhabdus sp.
DGAHDVAHLYRVWKNAQKICEAECGNLRLVFAAVLLHDCVSVEKNDPNRHLASRMAAEKATLILKDLGWSEEDIAAVGHAIETHSFSAGLTPETLEAQIVQDADRLDSIGMMGVARCFYTAGRMRSGLYNAYDPLAKQREYDDRAYAVDHFYTKLFKIEAGFQTETGKQMARERTKRMEQFLNEFFDEIQAE

SEQ ID NO: 7642 - protein, 168 aa, Xenorhabdus sp.
VTEIYSDEYWMRQAMDLAMQAQAKGEIPVGALLVADNKIIAEGYNHPITDHDPTAHAEIIALRRGGTQLQNYRLLETTLYVTLEPCIMCAGAMIHSRIQRLVYGASDMKTGAAGSLIDILRHPGMNHRIEITGGVLEQECSAMLSAFFKQRREQHKELKRLKKQQMEE

SEQ ID NO: 7643 - protein, 1295 aa, Xenorhabdus sp.
MEILRGSPALSAFRITKLHSQCQAQQLPVTEIYAEYVHFAEINLPLTAEEQEKLNRLLKYGPSLAEHEPKGQLFLVTPRPGTISPWSSKATEIVHNCGLKQIARLERGIAYYIQCGEMNDMQWQALSALLHDRMMERVFTQFEQAEVLFSHQQPAPLKQVDILQSGRAALESANIELGLALAADEIDYLLRAFQKLERNPTDVELYMFAQANSEHCRHKIFNADWVIDGQEQEKSLFKMIKNTFEQTPDHVFSAYKDNAAVMEGSQAGRFFPNPENGVYDYHQEPAHILMKVETHNHPTAISPWPGAATGSGGEIRDEGATGRGAKPKAGLVGFSVSNLKIPGFEQPWEEEFGKPERIVSALDIMLEGPLGGAAFNNEFGRPALLGYFRTYEEEVTSHNGTELRGYHKPIMLAGGIGNIREEHIQKGEISVGARLIVLGGPSMNIGLGGGAASSMTSGQSDAELDFASVQRDNAEMERRCQEVIDRCWQLGNDNPILFIHDVGAGGLSNAMPELVSDGGRGGRFELRNILNDEPGMSPLQVWCNESQERYVLAVAPEQLALFEDICQRERAPYAVIGEATEERHLLLNDRHFDNQPIDMPLDVLLGKTPKMLKNVNSLKAQGKGLERQGIDLAEAVKRVLHLPAVAEKTFLITIGDRSITGMVARDQMVGPWQIPVSDCAVTTASLDSYYGEAMSMGERAPVALLDFAASARMAVGEALTNIASAYVQDLKRVKLSANWMSASGHAGEDAGLYEAVKAVGEELCPALGLTIPVGKDSMSMKTRWTQDGEKREMTSPLSLVITAFARVEDVRYTVTPELSTDDDNALILIDLGLGQNALGGTALAQVYRQLGDKTADIRSTEQLADFFKAIQQLIAERKLLAYHDRSDGGLLVTLAEMAFAGHCGLHANISAFDEDILAALFSEELCAVIQVRETDREQVENLLADYGLGDCVHYLGQAKVGDDFVISSNNMEVYRQNRSTLRLWWAETTWQMQRLRDNPECADQEHQSKQDLSDPGLNVKLTFDPAEDIAACYISKQVRPRVAVLREQGVNSHVEMAAAFHRAGFEAVDVHMSDLLSGRVTLEQFQTLVACGGFSYGDVLGAGEGWAKSILFNSRVRDDFAHFFSRPDTLSLGVCNGCQMISNLHELIPGTEYWPRFVRNYSERYEARFSLVEVTESPSLFLQGMAGSRLPIAVAHGEGQVEFRSSQSLAELEKHQQIALRFVDNYGQPTENYPANPNGSVGGITSVTSLDGRVTAMMPHPERVFRTVSNSWHPEEWGEDGPWMRIFRNARKQLG

SEQ ID NO: 7644 - protein, 112 aa, Xenorhabdus sp.
VIKTGTRHLFLSGQVGINKDEETIPGGLPAQTKLALENLHSVIREAGGELSDITMLRIYIKQGAESHENQLVISSLLQQYFPSEPPASSWVIVTGLSLPEWLIEIEAEAILD

SEQ ID NO: 7645 - protein, 497 aa, Xenorhabdus sp.
LAFYHLISVSINVIAGFKMISLKKRRLFPRSLRQLVVMAFWLVLLPLLVLAYQAYQSLDQLSTQAAEINRTTLSDARRSEAMIGVALEMERSYRQYCVLGDVRLEKLYQRQYQQYTTMLNNQMAMLANKEYKDKFNQLLSGLNKITCRNSVPEAAAAKLLEQFSNANNQLVQETRNIIFIRGEQLQKEIADKGQFFGWQSLILFLLSAFLIALFTRMIIGPVKGIERMINRLGAGQALENKIESFKGPRELRSLALRIIWLSERLSWLESQRHEFLRHISHELKTPLASMREGTELLADEIAGPLTTDQKEVVTILDSSSKHLQQLIEQLLEYNRKIVDVPAEQQVVSLKEIIDSVVLSHQLPARTKNIHTEIQLDADDCWAEPKLLMRVIDNLYSNAVHYGAESGNIWISGRQVDKNIQIDIANTGTPIPELEKSMIFEPFYQGKLQRKGAVKGSGLGLSIAQDCIKRMGGKLHLIESDFADVCFRIELPLTAEND

SEQ ID NO: 7646 - protein, 286 aa, Xenorhabdus sp.
MKTEQQNIVTRTVKKKAVMPHLSERAVSRCFRTMMLLFVPYLLAGCVSNSTSGELTKISEAIMPEQRVIDYHPKGCDVIWNITKTAAMENSLYWLRLIDCTEKLSPTEARDKVKQFMADDWSQVFKQSILINHSIPSVAERRSIIENLNRYSSQFPPSLQPLLQLWRDQQYLKISLAEQKSKYQRLQSDSENKIDRLKEARTRLEYELHSISRKLENLTDIERQLSSRKQSQNVSSASVETEYPVDESGNKINESHPESHSKRLPERKSETKTEDNFSEEKGAEVQ

SEQ ID NO: 7647 - protein, 445 aa, Xenorhabdus sp.
MTARNPAHLLLVDDDPSLLKLLGMRLISEGFRVTTVESGHEALRILLKEKVDLVISDLRMDEMDGMALFAEIQKQHPGMPVIILTAHGSIPDAVAATQQGVFSFLTKPVDRDALYKAIDDALELSTPAIDGKWSEQIVTRSPLMLRLLEQAKMVAQSDVSVLINGHSGTGKEVLAQAIHRASPRAKKPFIAINCGALPEQLLESELFGHAKGAFTGAVSSREGLFLAAQGGTLFLDEIGDMPLALQVKLLRVLQERKIRPLGSNRDLDIDVRIISATHRDLPKAMQRNEFREDLYYRLNVVNLKIPTLNERAEDIPLLANHLLRESAKRHKPFVRSFSTNAMKCLMAASWPGNVRQLVNVIEQCVALTTAPVISDALVMQALEGENTALPTFVEARSQFELNYLRKLLQMTKGNVTHAARVAGRNRTEFYKLLARHELDANDFKE

SEQ ID NO: 7648 - protein, 540 aa, Xenorhabdus sp.
MSRTLNIALAQLNWLVGDIEGNSERMLHTVQEQQEKGADLVMFSELSLSGYFPEDLLFRSDFHQRCREQLVRLQEASSQVGILVGHPWQQNGKIYNALSLFWKGETVARYFKQQLPNYGVFDEERYFDAGERNCVIPFKGYNLGLLICEDLWFDAPVDALKQAGADIILSMNASPYNHEKPNIRSALIKSHCQRIHLPIIYLNQVGGQDQLIFDGCSKIFDMNGEITHRMAAFEEQVEQCRLSDMTIEPMANPIPPLPPLGQIYKALVLSVRDYVQKNGFKGALLGLSGGIDSGLTLAIAVDALGKEHVQAVMMPFRYTSEMSIHDAREQAELLGVEFDIVSIEPMFDAFMAQLEPMFAGTEKDTTEENLQARCRAVILMAMSNKRRRLVLTTSNKSESAVGYSTLYGDMAGGFNALKDVPKTMVFALSTYRNTLSPAIPQRVIDRPPSAELAPDQLDQDSLPPYDMLDAILEGYVEKDKSVADFVAEGFDEAIVRKVIRLVDINEYKRRQAPIGPRITQRDFGKDRRYPITSGFGRKNW

SEQ ID NO: 7649 - protein, 447 aa, Xenorhabdus sp.
MMTATNFSDFELDECLLDALNDKGYERPTAIQAAAIPAAMDGRDVLGSAPTGTGKTAAYLLPAIQHLLDFPRKKSGPPRILILTPTRELAMQVAEQAREMAAHTHLDIATITGGVAYMNHAEVFSENQDIVVATTGRLLQYIKEENFDCRAVETLILDEADRMLDMGFANDVETIAGETRWRKQTMLFSATLEGESIRDFAVRLLTDPVEIDAEPSRRERKKIQQFYYRADNLAHKTALLCHLLKQEDVTKSIVFVRKRERVRELVEWLHQAGIQSSFLEGEMVQAKRTDAVKRLNDGRVKVLVATDVASRGLDIENISHVFNFDLPRTADVYLHRIGRTARAGRKGTAIALIESHDHPLLGKISRYLQEPLKVRVVDELRPQTKAPSENKSYKPSKKVLAKRKEKKKTEESKKNRVKVRHRDSKNIGKRRAPSGNPKPELPESTDN

SEQ ID NO: 7650 - protein, 132 aa, Xenorhabdus sp.
MLTGLNHLTLAVSHLEHSLDFYINLLGFTPHARWQNGAYLTLGDLWLCLSRDEAKPAQDYTHIAFNIEAQHFSAFREKLLSAGVKQWKENRSEGDSIYLLDPDGHQLEIHVGSLTSRLDALRIKPYEGLEWY

SEQ ID NO: 7651 - protein, 406 aa, Xenorhabdus sp.
RSNINQLFDDLDNDKADFLAAGLIYNKERLNQTRTGPAYYSVSQQLVYRKGTVRPRSFADLTGSLVVSAGSAHVSELKQLKEKSYPDLNWEESSHSNSQELLEQVSEGKIDYTISDSISLALQQRIHPNLAIAFDVSEDKPLTWYLKRNDDYSLYSAMLDFFNMLTENGITSRLEDKYFSHIGSFDYFDTISFIRAINKLLPTYQPIFEKYAGSLDWRLVAAIAWQESHWDPLATSPTGVRGMMMLTRPTAEWAGIKDRLDPEESVKGGMAYLHYLMERLPETIPEDERIWFALAAYNIGYGHILDARKLTTMQKGDPNLWMDVKSRIPLLAQKKYYTNTTYGYARGYEAYRYVGNIRRYYQSLEGYLRARNNRNKTETPDMQAEPATASNSHPPAEAPASAQVIQ

SEQ ID NO: 7652 - protein, 183 aa, Xenorhabdus sp.
MIELKKPKILNISDIAHSRLFNIQSVDLEFSNGARRIYERMKPTNHEAVLIIPVIGDDLLLIREYAVGIEQYELGFPKGAIDAGESILEAANRELKEEVGLGARKLELLTKLTMAPSYFSSKMNIVIAQDLYPEDLEGDEPEPLVQIRWPIADMMSLLEHPDFNEARNVSALFFAQRYLNETC

SEQ ID NO: 7653 - protein, 300 aa, Xenorhabdus sp.
MYPATWYIGLDIHNHYIRALAATKRRHGWQFRHCWHYSLFNETSLFSETPLLNKVPNTPISGGWLQYPEKLRKILTQWRQILPNKVKLRLALPVQQTLQKQIPLPQHISLQEPELGWFVRANAEKQFPTTDLALDYRVHGQQICISATRQKDLNFWLSLLAEVGLSPDAIDIAPCALRYVAELAGISGNSWLVHQRKTDWLWLAPASLPFSYGLISTQSHASLTQVINQLPITPDGENYPIYYSNEQPTSLIRVKQQPAPAESVQVWHLLSAFCHYQPPIPENISAFMIAAGLALRPDDQ

SEQ ID NO: 7654 - protein, 92 aa, Xenorhabdus sp.
MEQNQRYLQLFRQLPHLLPEKSWLTTFSDDSGQLVFAANSQSYEDVSDLLDNLTGNISLINVQLKKMTTTPEDSLRVFTIDAEWLMGNNNEK

SEQ ID NO: 7655 - protein, 316 aa, Xenorhabdus sp.
NENTANEATEFHQSEQDDQEIEYQVITLQYADAGKITEQLQKNTPALLTKWGKVEHDALTNSLILEDKFDAITRIKNWLKEVDTPQQQVQITAHIVTSSREALHELGIHWGMTADPLNRALGFNRLNLHQPAGSQSHRLVLNAARIHATLLEMELSALEQENQLDIIASPRLTASHQQPASIKQGSDIPYIVQNKDKTSIQFKEAVLGMEVTPHILKNGKIRLILKISQNAPGLPINQGGNENLAIDKQEIMTQVTVRNGETLILGGIFQQKKGASLQKVPYLSEIPILGALFNQQGERHSRRELVIFITPQLTDI

SEQ ID NO: 7656 - protein, 186 aa, Xenorhabdus sp.
GLSLTNSLSNTKNMAEKRNIFLVGPMGAGKSTIGRQLAQQLNMEFYDSDQEIERRTGADVGWVFDVEGEEGFREREEKIINELTEKQGIVLATGGGSVKSKETRNRLSARGVVVYLETTIEKQLARTQRDKKRPLLQVDAPAREVLENLADERNPLYEEIADLTIRTDEQSAKVVANQIIELLEKN

SEQ ID NO: 7657 - protein, 362 aa, Xenorhabdus sp.
MEQVIVTLGERSYPITIAQGLFSSSEAFRPLQSGQQVMIVTNETLAPLYLEQVKSTLLNMGLRVNEVILPDGEQYKSLFVLNDIFSALLENNHARDTTLIALGGGVIGDMTGFAAASYQRGTRFIQVPTTLLSQVDSSVGGKTGVNHPLGKNMIGAFYQPASVVIDLNCLNTLPAQELYAGLAEVIKYGVILDGEFFDWLESNIEKLLDLDHQAMAYCIRRCCELKALVVAADEHERSGMRALLNLGHTFGHAIEAEMGYGVWLHGQAVAAGMVMAARASELVGSFSGQDTQRIISLLERAKLPVHGPSEMPPENYLPHMMRDKKVTAGKLRLVLPTAIGKAELRSDISTDIILDAIRRCSE

SEQ ID NO: 7658 - protein, 316 aa, Xenorhabdus sp.
MDELKSENKQKTENEFKPDTSDRPPQRSRPQKQNPKLAISRQQMMIGVGILVLLLLIIAISSALKSPTEHEKQQSSNSVEKSINLSGTSSSSDNEQNSTQEAPSTSATSATDHPHEIGMPPISSTPSQSISPTSGTGGYNQRIELPGDISDALNQQQSNINNVVQKNTEQENQPSSQPTPQQSRVKQTTVTPVEQQKTEKQHKVATKPATTDHQTNKQSTASIGEDLLKVPANRFTLQLSSASRPDTLIAFAKKNNLSHYKVYETKRNDKTWFILIYGSYNSASDAKKAIASLPVDVRTQKPWVRKLQQVHQDLKK

SEQ ID NO: 7659 - protein, 272 aa, Xenorhabdus sp.
MKKKRAFLKWAGGKYPLVDDIKRHLPEGDRLVEPFVGAGSVFLNTDYDSYLLSDINSDLINLYDTVKFRADEFIDHVRPLFSPAYNTSETFYRLREEFNKSKDPFHRSVLFLYLNRHCYNGLCRYNLRGEFNVPFGRYKKPYFPEDELYWFAEKSKKATFICQHYEVALTNVPKGSVVYCDPPYAPLSATANFTAYHTNSFNLTDQENLARLAYNLSSQHGIPVLISNHDTPMTREWYHHASLYIVKARRTISRNILARSKVDELLALYCQK

SEQ ID NO: 7660 - protein, 224 aa, Xenorhabdus sp.
MKKDFLIAPSILSADFARLGEDTAKVLAAGANVVHFDVMDNHYVPNLTIGPMVCQALRDYGITAPIDVHLMVKPVDRIIPDFAKAGATYITFHPEASEHIHRTLQLIKDHGCKAGLVFNPATPLSYLDYVLDKLDVILLMSVNPGFGGQSFIPETLHKLRHVRKIIDESGYDIRLEIDGGIKANNIAAAAQAGADMFVAGSAIFSQPDYKAVIDEMRSELSTVA

SEQ ID NO: 7661 - protein, 234 aa, Xenorhabdus sp.
MKKNVVQAIQAIAFDLDGTLVDSAGGLADALDQALLTKGLPAAGKERVAVWVGNGSDIMVERALKWAVGEFSPELFSETRSLFDKFYETTVTTGSKLFPHVKETLAELAKHNLPMAIITNKPTPFIAPLLESLGISQYFSLVLGGDDVKQKKPHPAPLYLTMGMFGLNKDELLFVGDSRNDILAAQAAGCPCVGLTYGYNYGESIALNHPDYVLDNFPDLLPTIGLPTLNLQEA

SEQ ID NO: 7662 - protein, 332 aa, Xenorhabdus sp.
KPIVFSGAQPSGELTIGNYMGALRQWVQMQDEYDCIYCIVNQHSITVRQDPEELKKRTLDTLALYLACGIDPKKSTIFVQSHVPQHNQLAWALNCYTYFGELSRMTQFKDKSARFPENINAGLFNYPVLMAADILLYQANQIPVGIDQKQHLELTRDLAQRFNALYGEIFTIPEPFIPKEGARVMSLQEPSKKMSKSDDNRNNVIALLEDPKSVAKKIKRAVTDSEEPPLVRYDLENKPGVSNLLDILSGVTGKTIPELEAEFEGKMYGHLKGAVADAVCEMLVDLQERYHHFRNDEALLNQVMAEGAAKAQARAQETLNKVYEAIGFITHP

SEQ ID NO: 7663 - protein, 651 aa, Xenorhabdus sp.
MTQIIKHPIPADIAETALINKQQYLQEYQRSLQDPKGFWGEKGKIVDWIKPYTKVKNTSFDPGHISIRWFEDGTLNLSANCLDRHLQERGHQTAIIWEGDNPAESRHVTYQELYHDVCQFANVLKKLGVKKGDVVAIYMPMVPEAAVAMLACARVGAIHSVIFGGFSPDAISGRIIDSNAKLIITANEGLRAGRVVPLKKNVDEALSNPAVTNVTNVVVFKRTDNATNWHTGRDLWWHELTKEISSDCPAEEMNAEDPLFILYTSGSTGKPKGVLHTTGGYLVYASLTFKYTFDYHPGEVYWCTADVGWVTGHSYLLYGPLSCGATTLMFEGVPNYPDVNRLCQVVDKHQVNILYTAPTAIRALMAEGDKAIEGTKRTSLRIMGSVGEPINPEAWEWYYKKIGNSKCPIVDTWWQTETGGFMITPLPGATDLKAGSATLPFFGVSPAIVDNTGETLSGESEGNLVITDSWPGQARTLFGDHDRFEQTYFSTFKGVYFSGDGARRDEDGYYWITGRVDDVLNISGHRLGTAEIESTLVAHPKIAEAAVVGIPHRIKGQAIYAYVTLIHGEEPSPDLYAEVRSWVRKEIGPIATPDILHWTDSLPKTRSGKIMRRILRKIASGDTGNLGDTSTLADPGVVEKLLEEKQSIMMP

SEQ ID NO: 7664 - protein, 544 aa, Xenorhabdus sp.
ALFSSLYPILTQADAISGNVEKQPLNIQAIIMFLLFVGFTLYITYWASKRTISRSDYYTAGGRITGFQNGMAIAGDYMSAASFLGISALVYTSGYDGLIYSIGFLVGWPIILFLIAERLRNLGRYTFADVASYRLKQRPIRTLSAVGSLVVVALYLIAQMVGAGKLIELLFGLNYYIAVVLVGILMVLYVLFGGMLATTWVQIIKAILLLAGATFMALMVMKAVNFNFNTLFKEAIAVHSNGQKIMSPGGLVSDPISALSLGLALMFGTAGLPHIIMRFFTVNDAKEARKSVFYATGFIGYFYILTFIIGFGAILLVSPNAAFKDGTGALLGGTNMAAVHLATAVGGDFFLGFISAVAFATILAVVAGLTLAGASAVSHDLYANVIKQGQANERDELRISKITVVFLGIIAIGLGILFEKQNIAFMVGLAFSIAASCNFPIILLSMYWNKLTTRGALIGGWLGLIIAVVLMILGPTIWVSILGHEKPIYPYEYPALFSMIVAFASAWFFSITDTSEQGQQEREMFRRQFLRSQTGIGIEQGKAH

SEQ ID NO: 7665 - protein, 572 aa, Xenorhabdus sp.
VIILAIFMISLTIMASFLTFRWRRSDNARYMSLKTNTVSRKLSAVEFQIIESYLKNILPQTKLDRSYVSGYPVFPIRDNNVYTISHTITRFSAVSGETQHWRYYLDETEIYFPALLEPFVNQRNTIDIVKTSSIPLVIAVNGHSLTDYQQDLLVTPSIKKAEHASIQKNGNSNANLLYLRKETPEEYRLRHSTGIQEGVLMCTGLSLWFLALFVPSPLLPWLMLVSVLFILASFWPFFRLPSARNYLNISCFSGILKRWGVFSEFEQENKKNISLGGVDLIYPVHWEPYVAHELDKNTDVEMYSNGQVVRQGQHLSLNEEERLYPYQRYQKNQMLVVFSILAMLVLYLYQPVSLSMRLSFAWLHGNNTTVITDAGELSNMPLRQGDVLRVKGTGMCYMPPKSGTLSSPDDFSFLPFDCFGVYWNNGSSLPIPESEIINKASALLTTVNEQLRPMDHARKYNPGLNEVIAKSGMILLDNFPQIILKTNALCFKEGDCNRLKNALVNLSNAKSWDDLLSQAEKGKLNGTKVLLRSVSADALGKLVDSTAALFVQRETDRYSILLNSPPPGGEFN

SEQ ID NO: 7666 - protein, 846 aa, Xenorhabdus sp.
KFQVKFIKYFLILVVFCIFLGTASIFGLYKYIEPQLPDVATLKDVRLQTPMQVFSADGELIAQYGEKRRIPLTLSEMPPLLVKAFIATEDSRFYEHHGVDPIGIIRAASIMMTSGHASQGASTITQQLARNFFLTPERTLIRKAKEVFLAIRIEQMLTKDEILELYLNKIHLGYRAYGVGAAAHVYFGKNVNELTLSEMAMIAGLPKAPSTLNPLYSYERATNRRNVVLGRMLEEGYITQRQYYQARSEKLVASYHTPQIAFSAPYLTEMVRQDLINRYGESAYTDGYKVYTTVTRKIQLAAVDAVRTNVIDYDMRHGYRGAQEVLWKAGQLAWSQPKIIDKLKTLPKYGPLLPAVVMKSNATQAEVMLTDGSKAELTMAGVRWARQFKTDSLQGPAPQSVDSVIRAGEQIWVRKVNNVWWLAQLPEVNAALISINPINGAVEALVGGFNFELSQFNRVTQSLRQVGSNIKPFLYTAAMDKGLTLASLLNDAPISRWDAGAGTDWRPKNSPPTYDGPVRLRQGLGQSKNVVMVRAMRAMGVDYAADYLKRFGLPGENVVRTESLALGSPSFTPMQLVRGYAVMANGGYLVDPYFINKIEDDAGKILYEAKPKVACPQCTDIPVIYGDTTRSIELSEDSIENVAHSDVSQNPVLLPQPDLESVAPNLYVDDQQYAPHVISTPLAFLIHDALKTNIFGEPGWMGTGWRAARDLKRRDIGGKTGTTNSSKDAWFSGYGPDMVATVWIGFDEHSRSLGRTPALKGEGGAKTAQPIWDDFMKMALEGVPEKLMEAPQGIVSVTIDRATGKLSSGGKNTRSEYFIEGTQPTEYSVPEAGTTVIENGESQELF

SEQ ID NO: 7667 - protein, 224 aa, Xenorhabdus sp.
EMYYPQIYRGKIISSEKLGSSAINKLLVNGSLQLTSLGLEGDEQAEARFHGGPDRALCHYPMEHYLFWKRQFPELMELFVPPLFGENISTEGMTEESVYIGDIFQWGEAIIQVTQPRSPCYKLNIITGIENFAAIMQDRGYCGWLYRVISSGVTCAGEPIKLLSRNSDVSVKEAISIAFHSLFDEEQYRRLMGAAGLSASWNLTMQKRILLGKIESFSHRLFGK

SEQ ID NO: 7668 - protein, 208 aa, Xenorhabdus sp.
MSHSLPSLPYSYDALEPHFDEQTMLIHHTKHHQTYVANTNTALENFPELAGLDIDDLVQQLDKIPADKRTFMRNNAGGHSNHSMFWKGLKLDTTLSGALKAAIERDFGSIDAFKTKFEQAAATRFGSGWAWLVLKEDGKLDVVSTANQDSPLMGQEISGTSGYPILGLDVWEHAYYLKYQNRRPDYIKAFWHVVNWDEAARRYEEKIK

SEQ ID NO: 7669 - protein, 303 aa, Xenorhabdus sp.
MIDLRQLSYFVVVAEEEHVGRAAKRLHISQSPLSRQISQLEDRLGLMLFERSQQRIRLTSDGQTFLTEARSLLTHANRLESLGRRLGRGEDGGLCVGYIENAMHSGILPSSLSVLRDSHPDVHIALYNQTPERQFEGLRQRSLDFAMVDTPPEGKGSELEYRQVLNDRMLVAVPHHHPLATKEHIIPDDLTAQQWISVLHNNDNSHSRDDFVAACVKAGFRPDIRLEAEEPLTALGLVAAGLGVTLIQNSLRYNLPKGAILREVPWMNITTQLWAVWHKANLRPLVVYFRELLNQIENEKITS

SEQ ID NO: 7670 - protein, 484 aa, Xenorhabdus sp.
LTDLINFINNILWDYVLIYLLLGVGLYFTIRFGFIQLSHFGHMFSVLKHSKKSDKSGISSFQALCTSLAARVGTGNLAGVAIALTAGGPGAIFWMWVVAFIGMATSFVESTLAQLYKTKDDQGNYRGGPAYYMEKGLKKRWMGVLFSFFLIIAFGLVFNAVQANSIAQAASFAFDINPLYVGIALVIISGVIIFGGLRSIARVAELVVPFMAGAYLILAFWVVGHNIERIPEVFALIFKSAFGFQEAAAGALGYGISQAMLQGVQRGLFSNEAGMGSAPNAAASASPYPPHPASQGYVQMLGVFMDTIVICSATAVIILSSGILNENITAISGIELTQRALSSAVGHWGTTFVAIAIFFFAFTSIIANYAYAESNMIFLERNHTAGLFILRIAALAMVMFGTMAEVPLVWNMANVSMACMAIVNLIAIFLLSGIALKLAKDYNQQRQAGKLPTFDINMYPELQKQIEEGIWDNEPAQKNQKRNS

SEQ ID NO: 7671 - protein, 269 aa, Xenorhabdus sp.
LLIGCSRQSPLEERNDYLIDHSYSYSTKQNIESVKFLVVHYTALNEKRSLRALTGGNVSVQYLIPAHPKYKNNEPIIFQLSSEGEKAWHAGRSEWRGYKNLNNYSIGIEIVNCGFKKYFFKKEWCEYHPTQIDALIRLAKDIIRRHKIEAVNVVGHSDIAPLRKEDPGPVFPWHTLYEEGIGAWPDAATVSKYLADRAPDTPVPVIKIQKALAVYGYSIPQTGYLDVHTHKTIRAFQMHFRPSDIQGYPDAETEAIALALVEKYKLNEN

SEQ ID NO: 7672 - protein, 453 aa, Xenorhabdus sp.
MTGHIQQSTLKRGLKNRHIQLIALGGSVGTGLFLGIAQTIKMAGPSVLLGYAISGFIAFLIMRQLGEMVVAEPVAGSFSHFAYKYWGNFAGFLSGWNYWVMFILVGMAELTAVGMYIQYWWPEIPTWVSAAIFFVVINSVNLINVRLYGEAEFWFSMIKVGAIIGMILFGSYLLISGTGGPQASVSNLWQYGGFMPNGAAGLITAMAVIMFSFGGLETVGITAAEAENPEKNIPKATNQVVYRILLFYIGSLFILLSLYPWIKVVEGGSPFVLIFHNLDSFWVANALNIVVLTAALSVYNSGVYCNSRMLYGLAKQGNAPRILTKVNKRGVPVLSIALSALATSIGVLINYVMPGKAFELLMALVVTTLVINWIMICVSHLKFRAAKNAEGVKTSFRAFWYPFGNFLCLIFLACILIIILTIPGIRISVILMPFWIGALWVGYLFSRSNKVKT

SEQ ID NO: 7673 - protein, 306 aa, Xenorhabdus sp.
MAVLFRSHHQDLLLQGEVDAPEVIITSKASGRVAALHVRRGDDVKAGQLLISLDGPELAAKVAAAQAARDQAKAKLDLSISGTREEDIRSLEAAFLQAEFGYNNAKREFERLSHISVKGYSSASELDNARNARDIAYQKMLAAKAELDAGKNGDRIELRQQYQAALNEAEEKLQELKIQSNDLQVTAPVAGEIGPLPAEVGQLFNAGSPLATLVRIPETYFVYNLREDILAKVRKGDKVKLRVPALDNKEIEAEVRYIAPMGDYATKRATRATGDFDLRTFEVRLYPSQPIDGLRPGMSALWLWGR

SEQ ID NO: 7674 - protein, 345 aa, Xenorhabdus sp.
VLFILISATFSEGTLLNLPVSAVDNDHSSLSRSLIRNLNAAPHADIKTYDGGLAESLERLGSAEDYALLYLPFDLEKDALSGKQPTVRMYYNALFYGAGRYASVDFSGLMAETNAKYRSVIASEIGRQLPPLARATMSYDSLFNASGSYIYYQQFAATIHLLQLFVVTGTIYTMARGKHLLSEKSFVPALIGKLAPHTVTFTLLLMVEIMVLVAFSDAKVAGNPLYMPVVGFFYVIAAQSIGLLLFTFTNSAITAYTLIGMLVSIAMSFSGMVMPELSMVWPARLISNLEPLTHALNAMFDIFLREVSLKIIIYVCMLLAIYPLVCALLVRNRLWKRLSQSGESL

SEQ ID NO: 7675 - protein, 352 aa, Xenorhabdus sp.
MSLVYVKPTLWDLPVAVIDQDNSHMSRALIRHVDATAKVETKNYASLADARADMLHREIFAIIIIPTDFEKRLLGGKNVTVPVYGDATNRLANGEIQQDLILAYQKLLSEYNTKLLLKSGFSTEQIKVLLQPIKGETIGLFNPGVSYAAIVFPGLLVMLLQHSLLIASVRVSIAIRVTPKGKPPLPVYLGALSALLPIWLFLSVIFFVLWPWVLGYRQDAPIYQLLLMTFPFLLAVLGLGKLVTECLRSVEMIYLTLAFITTPVFYISGTIWPIQAMPDWVRVISSALPSTWATKIIAGMNQMNMPLQSMLGDIAMILLLGVIYMILGILVGMLRNGELRELRGFMKRLRGK

SEQ ID NO: 7676 - protein, 167 aa, Xenorhabdus sp.
MLIRVEIPVDAMGIDRLLRESFETSAEAELVHKLREDGLLTLGVVATDDEGHVIGYVGFTPVDVNGQDHNWVGLAPLAVAESYRRQGIGEKLVYEGLDSLNEFGYGAVVVLGEPEYYQRFGFRLAEEYQLLCQWPGCERYFQVYTLADVSLDDCHGLVTYSRHFAGV

SEQ ID NO: 7677 - protein, 74 aa, Xenorhabdus sp.
VLSLSAISFGSFAATEVKSADGEKIGVVSVAGAETLDSLTEALSKKADKAGAQSFRIISATGKNKLYGVAEIYK

SEQ ID NO: 7678 - protein, 143 aa, Xenorhabdus sp.
MESDKEKLIISQYITNQHVFTLCTSSPQDLWCASCFYLFDAEKMVLWFMTEADTRHGKIMQENAIVAGTIAEQTHNISQIKGIQFRGEVVALTGKDETIARAAYCHQFPVAITAKTPIWQLNLNEIKMVDNSLGFGKKLYWQR

SEQ ID NO: 7679 - protein, 246 aa, Xenorhabdus sp.
MKVNMLHSFTEQKISTKKLFDWESINKIFINECNEPLEVIYETDKIKLKPVYFLAGINGAVEYCAVRKNVAEKLIQASQLLPAHLGLLVLDGWRSRETQLALQEKTRATIAQQYSYLSIEEQKELLEQFVAPAPTEQNPVSPHLTGGSVDVTLFDIVSGNALFMGTEFDEVDDLSYTAALEQASDTNMPAVLYRRILHHVMLQAGFTNLPTEWWHYDYGNALWAFYKNDQAVYGAVEGIRESGSTI

SEQ ID NO: 7680 - protein, 403 aa, Xenorhabdus sp.
NTLIDADNSLMLWAFIMIAVAAAIMLEQKYKWATKIPGAVIALVIAILASNLHIIPTEAPAYDVVWEYIVPLAIPLLLFKTNLHNLITGSWRLFILFLISSVATMIGTVVAFHLLRGYIPELDKISGMMSASYTGGGVNFAAMAAKLAPSESMTASTIVADHMMMAAYFIILMVISGWSVARKFWGSPYSDAIDNNPELDKSQTLAAAYWKPKNIALKDIALALAWSIFIVALSFHLSSWLKALFGQPDSIYQELIFSLISDKYLLLTTVTFILVSIFKKTFSNLNGTQELGTYAIYMFFVVIGIPASVHAIISNAPLLFVFVFIIAMINLLITFSAGKVFKFSLEENILACNANIGGPTTAAAMAISRGWNSLVGPIMVIGTVGYVIGNYVGTFVYFMVENM

SEQ ID NO: 7681 - protein, 766 aa, Xenorhabdus sp.
IKPYHAAAGGWGSLEATTRFVFDSKQVLKNMVNLMRMNKPRGFDCPGCAWGDDNKSLFSFCENGAKAVTWEATRRHVDREFFATHSVSKLYEQSDYFLEYQGRVIEPMRYNHETDHYEPISWEQAFSLIARHINGMENPNQLELYTSGRASNEASWLYQLFGRVLGTNNFPDCSNMCHEASGYGLLKSLGVGKGTIRLNDFDHADAIFVFGQNPGTNHPRMLHSLRHAAEHGARIVTFNTLRERGLERFADPQKPLEVVTPMAGNISHRYYQPKLGGDMAAVRGMVKALLEVHNSRIAAGAAGIFAQDFISAHTEGVEAYLQEVAATEWVFIEEQSGLTQQQLREAADIYQHAERVICTWAMGITQHKHSIDTVREITNLQLLFGQLGKPGAGVCPVRGHSNVQGNRTMGINEQPSQAFLDSLANHFGFEPPRAHGHNVVQALEAMLRDEVKVLIALGGNLAAAAPDSPRTEEALRHCDLTVHISTKLNRSHLVTGKKDALILPALGRTEQDIQLSGAQFVTVEDSFSMVHASEGINKPLSDTQRSETAIVAGMADAVLGNTPTINWLELAGDYNKIRDHISATIPGFADFNKKCEHPGGFYLGNAAAELRFQTPSKKAEFSHAPLPDTLFPQIAGEDVPFALQTLRSHDQYNTTIYGLDDRYRGVYGQREVLFMNPEDIAQSGYQEGDLVDIETIWHDGIERKVCGFKLVPYTIPRGNLAAYYPETNPLVPMDSFGHGTGTPTSKSVPVKLSLTALKDAESQRLI

SEQ ID NO: 7682 - protein, 336 aa, Xenorhabdus sp.
MSIKKLLPSQIGFGGAPLGNMFRAIPDDEAIAIVQEVWNLGVRYFDTAPLYGSGLSEIRMGEVLSQYSRDDYVLSTKVGRIMLDEMEDPANRDFGEKGGLFEHGLKNKILNDYSEDATLRSIEDSLKRLKTDRIDIVWIHDLSQDFYGDSWLEHFNTARTGAFRALTRLREEGVIKAWGLGVNRVEPCELTLGLDEPKPDAFLLAGRYSLLDHSRALQRLMPEALEHNVDIVVGGPYSSGVLVGGAHFEYQKSSPAIHQQVAKIYQIAKQFNVDVKAAALQFSLANPAVAAVIPGSSRPGRMAEDLAALTAKVPTDFWLEMQRQGLVAVNAPLPIR

SEQ ID NO: 7683 - protein, 126 aa, Xenorhabdus sp.
MPQDNHLALVCALSKWIENHLGRVIHLEELAAYSGYSLWHMQKIFKEVTGISLGKYIRQRRLAGAVHLLKNSSQPIFDIALDFGFGSQSHFTYMFRKEYGITPYDFRQSTDIELEVKLPLHLSYNC

SEQ ID NO: 7684 - protein, 114 aa, Xenorhabdus sp.
MTLKNLNNQKELSITGNFSTSRLLVGDFYDAKLQLDSLFKQHGLMRFIERFIGRRHRVLIHPLEQSEGGLCSVEERVLLEITYVVSRAITQKMIIHQGECLLSDAEVKDILGRK

SEQ ID NO: 7685 - protein, 239 aa, Xenorhabdus sp.
MNVLIVDDEPLARENLRCLLAEETDIQIIGECANAVEAIGAIHRLKPDVVFLDIQMPRITGLEMVGMLDPEHRPYIVFLTAFDEYAIQAFEEHAFDYLLKPLEKERLSKTLQRLRSGYQKQHLADLQPENEQLKYIPCTGHSRIWLMQLDEVLYITSRMSGVYVMNTDGQEGFTELTLRTLETRTPLTRCHRQYLVNMTHLREIVFGENGHAELVLRNDARIPVSRRYLKPLKEELGLN

SEQ ID NO: 7686 - protein, 565 aa, Xenorhabdus sp.
MYEFNLVLLLLQQMCIYLVIAWLLSKTPLFIPLLQVSVRLPHKLMCYVIFSIFCVMGTYFGLNVNDSIANTRAIGAVLGGLLGGPTVGAMVGFTGGLHRYSLGGMTAFSCMVSTIIEGVLGGLVHIYLMKRGRINKLLNLWTAAIVTFFAECAQMGIILLFTNPFSEALQLVKNIAAPMIIANSIGAAMFIRILLDRRAIFEKYTSAFSAQALKIAVCTEGILLKGFNEINSMRVAKVIYQELEIGAVAITDRDKLLAFIGIGSDHHLPGTPIASEQSHRAIANNEVVYADGNEIPYCCSLNPTCKLGSALVIPLRGENQQVIGTIKLYEAKNRLFSSINRTLGEGIASLLSAQILAGQYERNKQSLLQSEVKLLHAQVNPHFLFNALNTLQAVIRRDSQQAGQLVQYLSTFFRKNLKRPEDIATLQNEIEHVNAYLQIEKARFCERLQITIDIPESLRYARLPAFSLQPMVENAIKHGTSQLLDTGRITIRAYQQTNLLLVEIEDNAGLYCPQKLGDGLGMSLVDKRLRLRYGEHYGVRVDCQPEEFTRVILCLPLEEEADKKA

SEQ ID NO: 7687 - protein, 975 aa, Xenorhabdus sp.
MAETLTTSQYAPLIAILTESYILKPGETIYTIAKRYSFTIDQLKEINQLYASNKPFSELSAGDEINVPKPRPNKYLPFNYFSSAQFVSKPIESGQMESGQVESGRSPETDDTGSALANSATRIGEILSSDNVGNSAINQLSNLAVGEANQQFQNWLGHYGTARVQANIDRRGHLDGSQLDMLLPLYDSESKMNFTQFGLRRIDKRNTINFGIGQRQFFDGWMLGYNAFLDHDFTGNNTRFGLGAEYTRNYLKLGMNGYLRLSNWRESRFLKDYDERPANGFDLRAQGYIPALPQLGGKLVYEQYFGNEVGLINKDHRGKNPAAFTAGINYTPIPLLTFGIDRKQDMSGNGDTQFNLEMNYEIGTPWSKQINPDAVGFSHTLQGSRYDLVDRNNQIVLEYRKREVIRLTLDSLISGHAGEIKPIHISVNSKYGLKTIQWDAANLLANGGKIERQSDKLYLLTLPKYHHSGNNAYTISAIAYDEHDNASKRAETQVQVLQAEASVNKSTFTARDHELSADGHSSTILKLVLKDGNGNPIPDSAEDLKFVSSELSGAGETPTIGKIKETQPGTYEALLTAGEKIGVLTVTAKFKKLTFTPIEITFFHPDKPIIKNVRMSGQLEMGHTLKASYTFNANNGESTDKSRYVWGDKGNVDITKGSTITESGKIPAYTLTLEDAGKVKALIVQAQNGLNITGNTKTIDTSMGQEQGNYTYGGTEGGKIKGIADNLKVAVNTGKAKKGETITLSVQTFNHGQPVRNVPIEVKATEALNRQNIHQAVTLQVNGNAGHYQGVTGDNGTLSLPLTDPNGLGVKTTLQVAGYGVSAPQTRHVTFTVATSPDSQYANFWGHMANTATGANGRVFSRPLLQAELDAMGMQGMTTYTENGEHWPRRIYRGAVWYCHKIHKELPTKEDLLNLYQIHQKNEMHDLYGWPQFRSYRSSTSGIDEDGKNAHFAVNIDDGTAHVINETVTDYVICI

SEQ ID NO: 7688 - protein, 95 aa, Xenorhabdus sp.
MNIKETNWYLYLIKTRNGSLYTGITTDVSRRLAQHTAGKGAKALKGKGPLTLVYHSAVPDRNTALRLEYRVKQLSKQQKERLVTAQPVCIVTYLS

SEQ ID NO: 7689 - protein, 154 aa, Xenorhabdus sp.
MNYHQYYPVDVVNGPGTRCTLFVAGCSHQCRGCYNQTTWRTDSGRPFTMAVENQLIADLNDHRIRRQGLSLSGGDPLHPDNTAAILRLVKRVKRECPDKDIWLWTGYVLDELSGLQQEIVSHINVLVDGKFEQEQQDPMLIWRGSRNQVIHYLR

SEQ ID NO: 7690 - protein, 641 aa, Xenorhabdus sp.
VKTVVMQRNDHLVNVGENTLHGWHDRLDQEIRGLIEQSDLPLLNENANKDARVIPTQRDLLAGIVARQYAKQHMLPSDVVLAHEKGEIHYHDLDYAPFFPMFNCMLVDLEGMLTRGFKMGNAEIEPPRSISTATAVTAQIIAQVASHIYGGTTIDRIDEVLAPFVKASYHKHLMIAEEWQIADKKAYAESRTEKECYDAFQSLEYEVNTLHTANGQTPFVTFGFGLGTSKESRLIQTAILRNRLAGLGKNRKTAVFPKLVFAIRDGLNHRFGDPNYDIKLLALECASKRMYPDILNYDQVIKVTGSFKTPMGCRSFLGVYEENGHQIHAGRNNLGVISLNLPRIAIEAKGDEMRFWQLLDQRLLIARKALMTRIERLESTKARVAPILYMEGACGVRLKEDDSVAEIFKHGRASISLGYIGIHETINALYGDHTHLFDNEQRRQKALAIVKHLRKAVDEWKQQTGYGFSLYSTPSESLCDRFCRLDVAEFGVISGVTDKGYYTNSFHLDVEKKVNPYDKLDFEAPYPPLANGGFICYGEYPNLQHNLKALEDVWDYSYFRVPYYGTNTPIDECYQCGFTGEFSCTSKGFTCPACGNHDSAQVSVIRRVCGYLGSPDARPFNTGKQEEVKRRIKHLNNGHIG

SEQ ID NO: 7691 - protein, 128 aa, Xenorhabdus sp.
MSRSIHTENAPAAIGPYVQGVDLGSMVITSGQIPVDPKTGAVSEDITAQTRQSLENVKAIIEQSGLKVANIVKTTVFVKDLNDFTVVNAAYEAFFTEHNAPFPARSCVEVARLPKDVKIEIEAIAVRS

SEQ ID NO: 7692 - protein, 158 aa, Xenorhabdus sp.
MTQEHPQDHQLQVEAIKCGTVIDHIPAQVGFKLLSLFKLTETDQRITIGLNLPSNHLGKKDLIKLENTFLTAQQANQLAMYAPHATVNNIENYVVVKKMPINLPEQIDGILVCPNGNCISHNEPVESSFHVMETANDVIVRCKYCEKEFDRQAVINND

SEQ ID NO: 7693 - protein, 126 aa, Xenorhabdus sp.
MTKKTPLWIRLSFAIRDKISSLAGVEKINGFSGGHLEENVREGSSIDFFKIIHISDDELCLLSEDIHLTVLVSLNVLSSNNQGKGYKVTVTASVITHNFFGKMYMIPVSLAHSLIVNCMLRKMILS

SEQ ID NO: 7694 - protein, 306 aa, Xenorhabdus sp.
TMIIRLNQHWFFRLFDWHGSVLSKITFRLMLNILMSIIAVVSYQWYEHLGIHLTVAPFSLLGIAIAIFLGFRNNTSYSRFVEARALWGSLLVTQRSLLRQIKSIQPDETHLHQQFSVLLIAFSWCLKHQLRGTDPKEDLYRLLPTEIYAEIIRSPMPTNRLLLKMSLLLGAWRKGGVLSDITYEMMDKNLNELSHILGGCERIASTPVPFAYTLILQRTVYLFCTLLPFALVTDLHCMTPFVSVFISYAFLSWDALAEELEDPFGTSPNDLPLNAICTVIERHLMEMNDQTSLPALLQPNEKFNLL

SEQ ID NO: 7695 - protein, 303 aa, Xenorhabdus sp.
LSWDDYRQQHGIEAAKQAFSEGLYQVEVNMSVPKSVVINLDEHRAKERDPLIPFTQARKEGIFHITPKLDKETGEIIKPEQWLCSFVEVIGTGTLDGDEDDQYLIFRWKAQGKKEPVIKGISSAHVGEREGWRILKAAGVQVTTKNHLRAILGDWFIRNPAQETWSVTTKTGWHKGAYIMPDGSIIGTPEQPVLFVGGSASANAYTVSGTAESWRKHVATLANNNPFMMLGIATALAAPLAGIVGTDGFGIHLYAQSTAGKTTTADIATSLYGEPDKQRLTWYGTALGIANEALAHNDGLLSL

SEQ ID NO: 7696 - protein, 40 aa, Xenorhabdus sp.
MKERIIDMAMNNAGVRDTARVLKVGINTVIRTLKNSHQDK

SEQ ID NO: 7697 - protein, 287 aa, Xenorhabdus sp.
MITQDEKKQVSDWFPTLTLPRPEDSHKGTFGTLNIIGGAETMSGACVLAGTAALKSGCGKVIIGFNQDPLAVQLIDTVPELILNKASQLFEGELPSAWVIGCGLGTSTEAVSFIQKMINYTHQGEKVLVDADGLNILAKFPSKIVLSDKTVITPHAKEASRLLQTDSQSIQSDRLGSAQALSARYGCWAVLKGHRTVIAAPDGRTWINETGNSGLATAGSGDVLSGIIGSLLAQGIPFEEAVRAGVWLHGKAADMLVADGIGPIGLTAHEIIDYVRKIRNQITNHDI

SEQ ID NO: 7698 - protein, 127 aa, Xenorhabdus sp.
MNKIVPFDWDKMYIIDKGMGHKDIEDIIGAAFKGKASLFYKIIFVRNKQVVYEDEYDPYIRSYEKKLLKPDFQYPYDGKENYFNYYAISKDNAILSMKIENKPLIDDDKVYYKLSPSNAQQVKEKNL

SEQ ID NO: 7699 - protein, 280 aa, Xenorhabdus sp.
MLSYRHSFHAGNHADVLKHTVQSLIIESLKEKEKPFLYLDTHAGAGRYQLSGEHAERTGEYLEGIARIWQRDDIPQELSGYMKVVKALNQHGVLRYYPGSPLIARHLLREYDELNLSELHPSDFPLLRSEFSRDRRARVLREDGYQQLKSKLPPKTRRGLVLIDPPYELKSDYQNVVKGILEGYKRFATGTYALWYPVVLRQQIKRLVKDLEKTGIRKILQIELGVRPDSDQRGMTASGMIVINPPWKLEQQMKAVLPWLQQVLIPEGTGHNSVEWIVPE

SEQ ID NO: 7700 - protein, 450 aa, Xenorhabdus sp.
MSKHYDYIAIGGGSGGIASINRAAMYGQKCALIEAKALGGTCVNVGCVPKKVMWHAAQIAESIHQYGSDYGFDATINRFDWKKLIASRTSYIDRIHSSYERVLGNNNVDVIQGFARFVDAKTVEVNGEIITADHILIATGGRPKNPAIPGAEYGIDSDGFFELDEMPKRVAVVGAGYIAVEIAGVLNALGSETHLFVRKHAPLRSFDPLIVNTLLEVINNEGPTLHTEAVPKAVIKNADGSLTLKLQDGREQTVDTLIWAIGREPATDNLNLSAAGVALNESGYIQVDKYQNTNVKGIYAVGDNTGAVELTPVAVAAGRRLSERLFNNKPDEHLDYTNVPTVVFSHPPIGTIGLTEPQAKAQYGDDQVKVYTSSFTAMYTAVTQHRQPCRMKLVCAGENEKIVGIHGIGFGMDEILQGFAVALKMGATKKDFDNTVAIHPTAAEEFVTMR

SEQ ID NO: 7701 - protein, 409 aa, Xenorhabdus sp.
MKKYQGFVYIAATLDTKSTEVFYVSELIKKIGLVVRVVDLTTKPNQLVNEADVHSEIIADCHPDGKQAVFCSDRGEAIAAMAIAFRNYLQQQTDIAAILGLGGSGGTALITFAMQSLPIGLPKLMVSTMASGNISGYIGVSDISMMYSVTDVSGLNFISRKILRNAAHQIAGSVYFNDQEDIYLQQKPAVALTMFGVTTHCVQQITAKLESDYDCLVFHATGSGGKAMEKLVDSNLLHSVLDITISEVCNYLFGGVLACDEDRFDSIAQTKTPCVISCGALDMVNFGHSSTIPEKYKNRQLYHHNAQVTLMRTTREENHRLGMWIAEKLNRCEGEIRFIIPTGGFSALDIEGGVFWSPDANNAFIQSFSTNYKITEKRKLIFSPHHINSIEFCEQVIQLHKEMINSIKV

SEQ ID NO: 7702 - protein, 128 aa, Xenorhabdus sp.
MFSKEYLVDDQHVDFQGVVDGLYYPFYLEWTRHAFMKEALGLDLEEEFKAGRMHVIIEYGLRFRKSLQKGHKMEVTCKVARNEKRNRINFEQQILVDGVVYADATFVATCLVNGRPTVPEIVMNAVED

SEQ ID NO: 7703 - protein, 539 aa, Xenorhabdus sp.
MSQSNSANDSLQTHLLQRHPSQQDSSQKHSLQKQAANTLPMLPLLSVRGIVKQFSGLAVLKQIDFTLMAGQVHALLGGNGAGKSTLMKIIAGLEQPDAGTLMMEGNTISQLTPAKAHQLGIYLVPQEPLLFPSLSVQENILFRLPKHLASKSWMQQLLTQLNCRLNLSAPAGSLDVADQQMVEIMRGLMRNSRILILDEPTASLTPAETERLFERIRELQQQQVGIIFISHKIPEIRQIADYVSVMRDGMIALSGAMAGFSTETIIQAITPTAKDSVLTKTQKLWLDAGNRQSAGDHADPMLEVTALCGEGFRDISLTLKAGEIVGLAGVVGAGRTELAETLYGLRPVVSGEIRLRQQVLNSLNTAARLRRGLVYLPEDRQASGLFLDASLSWNVCSLTHNQNAFWTRPAYDAAVLERYRRALNIRYSHASQPVRTLSGGNQQKILIAKCLEAKPAVLIIDEPTRGVDVGARTDIYQLIRSIASQQVAILLISSDLDEIVQLADRALVMHHGEICGHLDKSNMSVDAIMHLSFGERALC

SEQ ID NO: 7704 - protein, 339 aa, Xenorhabdus sp.
FIQNNREATALIAILGLFALLRSLEHDVFSFQTVTMIFSNAQILMLLAMGAALVMLTRNIDVSVGSTTGLCAVVLGMSLNAGFPLPIACLITLLAGMAAGLVNGVLVVWLKIPAIVATLGTLGLYRGLMLLLTGGKWIEGLPADVKELARPVLLGISFIGWLLILLVLAMTWMLKVTNFGRGFYATGDNLQGARQIGVPVNRIRIAAFAANGVMAALAGIVFVAQIGFIPNQTGSGLEMKAIAACVLGGISLLGGVGTVIGAIFGAYFLTQIDSVLVLLRLPAWWNDFIAGLVLLLVLVLDGRLRSAVEKNLRQQRYASFLKPADEPVAHSSEAGRRTS

SEQ ID NO: 7705 - protein, 332 aa, Xenorhabdus sp.
MISAIKRHGWETALAILLVLEILLFGIANPRMLDINVLLFSTSDFICIGIVALPLTMVIVSGGIDISFGAIIGLCAIALGIMNQSGMPMIAALPLTLIVGMICGLINYGLIFYTGVNPLVITLGTMYLFGGSALLLSGLSGATGYEGIGGFPAEFTDFANLTLLKLPIPLVVFIFCVIGFWLFMHRTHRGRNVFLIGMNHRVARYAAVPVNKTLCLLYVLLGLSSALAAIILVSYFGSARSDLGSSFLMPAITAAVLGGANIYGGSGSVIGTALAVLLVGYLQQGLQMMGIPSQISSALSGALLIVVVVGRSVSLHRHQIREWWQRWRSSAF

SEQ ID NO: 7706 - protein, 294 aa, Xenorhabdus sp.
MADLDDIKDGKDFGIDTPQKNTLFELKGCGALDWGMQSRLARIFNPATNKTVMLAFDHGYFQGPTTGLERIDINIAPLFEHTDVLMCTRGILRSQVPPATNKPVVLRASGANSMLTELSNEAVAVAMEDALRLNVCAVAAQVYIGSEYEHQSIKNIIKLVDQGTRYGMPTMAVTGVGKDMARDQRYFSLATRIAAEMGANIIKTYYVDTGFERIAAGCPVPIVIAGGKKLPELEALTMCYQAIDQGASGVDMGRNIFQSEAPIAMLKAVQAVVHQNEKPAQAYELFLSEKAKGE

SEQ ID NO: 7707 - protein, 99 aa, Xenorhabdus sp.
MHVTLVEINVKADKIAEFIEVFRDNHLGAVREPGNLRFDVLQDENIPTRFYIYEAYIDEAAVAAHKTTPHYLRCVEKLEALMSEPRKKTSFIGLMPEGK

SEQ ID NO: 7708 - protein, 325 aa, Xenorhabdus sp.
MAFNFQNITPDLIMDALAQSGLRVDSGLTELNSYENRVYQFMDEDRKRYVVKFYRPQRWNRQQIQEEHEFTLALQQADLSVAAPLVLDGQTVLEHDGFFFAVFPSVGGRQYESDNFDQLEDVGRLLGKVHQIGYQKTFSARPTISLNEYLYQPYQYLTECSLIPNAHKAAFFASLDELNKVVESQWNVDWQGLRLHGDCHAGNILWRDEAWFVDLDDARNGPAIQDLWMLLNGSRQEQLIQLDILLESYNQFAEFDLKTLALIEPLRAMRMVYYLAWVARRWQDPAFPKAFPWMADSDFWHKQISLFAEQIRLLQEPPLQLTPMY

SEQ ID NO: 7709 - protein, 207 aa, Xenorhabdus sp.
MKKFWFALVGVFMAFNASASDFSEGKQYVELKKAVADQPQVVEFFSFYCPHCYQFENIFHVPGTIAKNLPEGVTHERYHVDFLGPLGKDLTDAWAVAIVLKAQDKVLPVLFDGIQKTQTINTKADIRNAFIKAGISGEDYDAALNSFIVKSVASKERQAAQDFQLQGVPATFVLGKYMINNGGIETKSVQDYAKKFSDVVNYLVTKK

SEQ ID NO: 7710 - protein, 945 aa, Xenorhabdus sp.
MVQIADNPLILVDGSSYLYRAYHAFPPLTNSAGEPTGAMYGVLNMLRSLIMQYRPSHVAVVFDAKGKTFRDELFAEYKSHRPPMPDDLRDQIEPLHNMVRAMGLPVLVVPGVEADDVIGTLALQAEKEGRSVLISTGDKDMAQLVTPNITLINTMTNTILGPAEVTEKYGIPPELIIDFLALMGDSSDNIPGVPGVGEKTALGLLQGLGGLNDIYARLDEIATLSFRGAKTLGSKMEQHKEVAYLSYLLATIKTDVDLDKNCLDLAVAAPDNEELLAQFSRYEFKRWLKDVQDGGWLEGRSAEKGGQKSATGAAPTSSAPVKPAAVSISPESYQTILDRKSLDEWIEKLKQAPAFSFDTETDGLDTLTANLVGMSFAVVSQVGDVEKPAEGEPDVEAAYLPLGHDYLDAPQQLDRNEVLEALKPLLEDASLPKIGQNLKFDRGVLERYGVALNGIVFDTMLESYVLNSVAGRHDMDSLAERHLGYKTTTFEEIAGKGKKQLTFNQIALEEAAKYAAEDADITLRLHQAMYPQVDSVPTLKKVFQNIEMPLVPVLSRMERTGVLIDANTLAEHSKEITARLLELEKSAYELAGEEFNLASPKQLQVILFEKMNLPVVKKTPNGAPSTNEEVLEELAEHHELPRVILEHRGLAKLKSTYTDKLPQMVSPVTQRVHTSYHQAVTATGRLSSRDPNLQNIPVRNEEGRRIRQAFIAPEGYRILAADYSQIELRIMAHLSQDKGLLEAFAQGKDIHRATAAEVFGLPLEQVTSEQRRSAKAINFGLIYGMSAFGLSRQLGIPRGEAQRYMDLYFERYPGVLEYMERTRQQAAEHGFVETLEGRRLYLPDIKSRNGMRRKASEREAINAPMQGTAADIIKLAMIAVDDWIVREQPKVRMIMQVHDELVFEVHESELAAAEQKIRELMEKSMRLDVPLKVDVGTGDNWDQAH

SEQ ID NO: 7711 - protein, 189 aa, Xenorhabdus sp.
MFKRIFVPLITACAISVMAAPALAAETYVKLVTSAGEIELELNGDKAPITTKNFIEYVDEGFYNNTIFHRVIPGFMVQGGGFTKDMKQKATKAPIKNEADNGLRNLRGTIAMARTADKDSATSQFFINVADNAFLDHGQRDFGYAVFGKVVKGMDVVDKISQVKTENVGPYQNVPVKPIVILSAKVVSQ

SEQ ID NO: 7712 - protein, 191 aa, Xenorhabdus sp.
MLLIIDNYDSFTFNLYQYFCELGTRVLVKRNDELQLEDIEELAPTHLVISPGPCTPDDAGISLEVISHFAGKLPILGVCLGHQAIGQAFGASVVKAREVMHGKTSLIHHNQQGVFKGLNRPLTVTRYHSLVDAAETLPASFEVTAWSQHDGNVDEIMGIRHRTLPLEGVQFHPESILSEQGHDLLNNFLKY

SEQ ID NO: 7713 - protein, 44 aa, Xenorhabdus sp.
MIPPRSALKKDKQASEYHRRKIDELGDPLLVLDKYVISRHWLTP

SEQ ID NO: 7714 - protein, 72 aa, Xenorhabdus sp.
MDERLIAGLTRTLESLNSACEWEKRLKVAQEQRSKPKNNPTSAQPLPQKSSQARSEQKAKKKMKKVQAKKKK

SEQ ID NO: 7715 - protein, 211 aa, Xenorhabdus sp.
VMLPIHTFPNYTGTRKRTYQLLINTALTLFEQGIMPSISELALKAGVSRATAYRYFPTQSDLIAATVNTSLGPILTWQPKSEKTEERIAELMDFAYPRMFEYEVALRAALQVSLQQWIERRSLSSKPREKQLERGNRKETLSMVTFPMKNSFAPEIIDKVIKSFSIVYGSEIFLVLKDIWKINNEQVIEIAKWMAKAIMNQAIEDNKNKEK

SEQ ID NO: 7716 - protein, 518 aa, Xenorhabdus sp.
YLMALDAGTGSIRAVIFDLEGNQISVGQSEWVHQPVPNVAGSMEFDLQTNWQLTCQCIRQALQKAELPASAIQGVAACSMREGIVLYNRNGDPIWACANVDARSSHEVSELKELYNNTFEYDVYRYSGQTLALGAMPRLLWLAHHRADIYRQASTLTMISDWLAYMLSGELAVDPSNAGTTGMLDLVSRDWRPSLLEMAGLRSDILSPVKETGTLLGYVTNKAAAECGLDSGTPVIMGGGDVQLGCLGIGVVRPAQTAVLGGTFWQQVVNLPEPMTDPNMNIRINPHVIPGMAQAESISFFTGLTMRWFRDAFCAEEKLMAERLGIDAYALLEEMAARVPAGSYGVMPIFSDVMRFKSWYHAAPSFLNLSIDPEKCNKATLFRALEENAAIVSACNLDIVATFSGVQPDSLVFAGGGSKGKLWSQILSDVTGLPVRVPVVKEATALGCAIAAGVGVSLYDSMPETGERLVRWEREYLPNSGQWDVYQKAKKDWQAVYADQLHLVDDGLTTSLWKAPGL

SEQ ID NO: 7717 - protein, 62 aa, Xenorhabdus sp.
MQLEFEQSGESGINQLEFEQTIGNDINLEELAEQLGLPFIKEINGIGDPGMLAESIKNVLSI

SEQ ID NO: 7718 - protein, 74 aa, Xenorhabdus sp.
MIKTDKYQPVGDASVGYPQICIRTNRTAERTNVTPMIAAAMFIAKNFPWSLNDNEKEVVIKGVNKHPRRKQRGI

SEQ ID NO: 7719 - protein, 197 aa, Xenorhabdus sp.
MPALGMSSGVSMNQSNSPMNLPLLGITAYSGTGKTTLLKQIIPLLRLQQIRVGLIKHTHHNMDVDKPGKDSYELRKSGAAQTLVASQQRWTLMTETPELPELDLHYLASRFDATSLDLILVEGFKNEAIAKIALYRDGLNHTFEELIDPYVIAVASDIPLDTPLPQLDINRPEQVAEFIVKWLLLTPPTTFPLAHSQ

SEQ ID NO: 7720 - protein, 200 aa, Xenorhabdus sp.
MTYPKISGAILAGGLSTRMGGNDKGLLQFGGAPLYQHIAAKLQPQVHELLINANRNQAVYQQSGYPIIPDIITDFSGPLAGMLAVLKKAIHEWVIFVPCDVPDFPDDLVEKLWRYKQHAWAAYVHDCERAHPTLALMHRSLIPRLESYLALGDRKLMFFMQMIKAKTVYIPHPESFTNLNTPEECQNWQCQHWECLRESA

SEQ ID NO: 7721 - protein, 203 aa, Xenorhabdus sp.
NYNYHMTHFVTSAPDIRHLPPETGIEVAFAGRSNAGKSSALNALTRQKGLARTSKTPGRTQLINLFQVEEGVRLVDLPGYGYAQVPEEMKIKWQKALGEYLQKRECLQGLVVLMDIRHPLKDLDMQMIEWAVVMQVPVMVLLTKADKLASGARKSQLNKVRQELAFLEGNIQIEYFSALKKIGIDKLEQKLDTWFSQPAIEVE

SEQ ID NO: 7722 - protein, 294 aa, Xenorhabdus sp.
MRADRLDGRQVTFEQLRAFVFVAKHGGFTRAGEELGRTQSTLSLSIKRLEEDIGCRLINRRQGQIIGLTNEGKQLLPVAKDILFRMTQALHSVKSFQLRGRIALGVPDDFNIKNLHQAISWCLEKNPGLKIEITAAPSPILSAMTEKQQLDVVILKSVEGKPVNTETETFLQIEPLHWVASKDLYFNELQEIPLVTFSEGCVIRACAIKALEDMNKPYFLAYVSASFSNISSSIQHGLGIGLLPDSAITDDLCVLSSKHAVPGVPAIQLALKIVTQGELYTLFAEYLRRSLAES

SEQ ID NO: 7723 - protein, 79 aa, Xenorhabdus sp.
MDGVLINSEPLWKKSGMLVLNHYGVPVTYDEMFNMTGIPVPGMVDKACQLYNKNDLTQQPPTKVGGLVINGLKVRIRIG

SEQ ID NO: 7724 - protein, 385 aa, Xenorhabdus sp.
MAIPLDLNLLAANIKQWGLSLGFQQVGICDTDLSTEEPRLQEWLDKQYQGEMDWMARHGMMRARPHELLPGTLRVISVRMNYLPAKAAFASTLNNPEQGYVSRYALGRDYHKLLRQRLKKLGEQIQEYCSAHKYQGILNFRPFVDSAPIMERPLAAKAGIGWVGKHSLILNRESGSWFFLGELLVNLPLPVDSPQEEQCGRCVACMTTCPTGAIVEPYTIDARRCISYLTIELEGVIPEEFRPLMGNRIYGCDDCQLICPWNRFSQLTEEADFSPRAALHTPELLDLFNWSEEKFLRITEGSAIRRIGYLRWLRNISVALGNAPYRDEIVLVLEKRIGLSEVLDEHIHWAIAQQLSRRSIDAINVQTSQQKRLIRAITKGLPRDA

SEQ ID NO: 7725 - protein, 287 aa, Xenorhabdus sp.
MIEFNNGMTGTMLETLSLVNKHWGINDEFYSYFKGIKAFILNENGYHDESYDSAASSLKINSFDIYAIHAICHYFYDKKLFHEGKEWMDERKDIWYNNYGMRIHLFWHYAMFLMEINEIDQALDIYHQIRHKNDRHGLEDLDATSLLFKMKFTHGRDDQYIQKHANLLFESWNNKDELGFYFFNDFHAALVFGINKRFDMIDFLIEKTEKSNPIGYYNTKINILESIRNYSQENYKNVVLLLQEPMNYQFMGGSRIQRSIINEIFNDAKLKLGIKNKFQNTLLLSEI

SEQ ID NO: 7726 - protein, 232 aa, Xenorhabdus sp.
MANIVMLGFFGIYVYNLCFFYGLKYIDASRASLIVAINPAVIATVSYFLFKEKMSTIKTIGISFCLFGAGIVIIGNNLSSLLSNKGNMIGDISILGCVISWVIYSVFGRKTINEIGALYTVAYSVIVGAIMLTITAFVTDDFNFTALVSLSMSDLISLTYLGVIGSAIAYVLYYDGIGKIGATRAGVFIALNPLTAILGGVLFLQETFTVSICIGGIFIIAGIFMTNKKITK

SEQ ID NO: 7727 - protein, 304 aa, Xenorhabdus sp.
YMNQIITILWPLFALILLGFILKRNTSFNPLFWQGAEKLNYFLLFPALLINSLATTSLDNPQLPQLFWAILAVISTGLITLIVIKFLLKWPAQRFGVYVQGLLRFNTYLGLAITVDIFGSHGIAVASLILAILVPLCNAISVFALTPDIKTLSIKQFVMIITKNPLILACFIGITLNLTNIGLPYGSGQFLKILAGASLPLGLICIGASLQPSMLRTEKKPIIINSLSRLLLMPLVAGIIGCLFKLDVLEINLLILFFAIPTAPTAYILTRQLNGDSQLMSAIITLQTMLAVITLPIVLGLRFD

SEQ ID NO: 7728 - protein, 974 aa, Xenorhabdus sp.
MPVLHPASVSDYHDVGLWGWAASRVSGTWVGFKAISEVVESSTIRREKTLPEYKIPEIDPGPSGLHWRWPDLPSPLIEQRLVYKLKAVQDFARLNPIDQLIAPCQHPRALLVTVGKAHQDVLEALRIGGLSPAELTKNGVALLHIRLVYPLSPLLSEMASQVSDIFVIEEKNAVVELHLAQHLINLPRQINLIGKHDHLGNKLVSTDMELRPSLLAPLLADWLKKFDLFLSVPLEWTVQTTLHDITLPKRTPYFCAGCPHSTSTRLPEGSQAQIGIGCHVMAAWMDRSTGYGLTAMGSEGVDWIGHSAFINRSHVFQNLGDGTYFHSGHLAIRQSIAADSNITYKLLFNDAVAMTGGQALDGNITIQQIASLILAEGAKEVVVVTDDPDKYKGQNSLPAEVKIYQSDYLEDVQKRLRDIKGVTVIIYEQVCATELRRKRKRGLIPQAKRRAVINEAVCEGCGDCQIQSNCLAVVPIETPLGTKRAIDHHVCNSDLSCLKGFCPSFITIENANPVQDPGTIMSQEEIDNLLIKLPKPTIKMADAPFEILLAGVGGNGIITTGHMLGLAAEIEKYAVNLLDFTGFAQKGGEAMTHIRLSQNAEQLHQVRIDRGRADLAIAADLVTVTGQNSLEVMSKSKTSCVLNTHETQIGAMLRNPTLNLDQSRIQDTLRQHCRTLQSIDAEQIAAELVGDRNQTNIVLIGYAWQLGKIPISLHSIEQAIQKSGIKNHVIENARRALHIGRIAAVQPDILNNSLHVEPKQTIKTLDDLILHRYQLLVEYQNEKYALRYLSRVAQVQQVTQQINAEVLTKSIAENLFKLMAYKDEYEVARLYVKTGFLDKLRSQFDKTDKIRFHLSAPFFNRKDPRTGERGKREYGSWIIPVFRFLAACKPLRGTIFDIFGYQEERKQERDLLSEYEQLIDLLIEKLNSNNMEICQKLAVLPDQIRGFGHVKQKTIKNMQERREILLKELTESTY

SEQ ID NO: 7729 - protein, 857 aa, Xenorhabdus sp.
IETLKQRLDAINQLRLERATDSMSATFKQVYNLIPVLLHYHHPMMPGYIENDVPHGVCFFKPDETQLFWIKDMEYQPAGIVSHSSNGELPIAGIYSMGSTSSIGQSCSSDLDIWVCHQSWLDNSEKDSLEQKCSLIQQWAASLGIEVTFFLIDENRFRHNTSGSLNGEDCGSTQYILLLDEFYRTAVRMAGKRLLWAMVPVEEEANYDDYVTSLYAQGVLTPNEWLDLGGLAELSAEEYFGASLWQLYKSVDSPYKAVLKSLLLEAYSWEYPNSELLATEMKQHFHEGLIVSYGLDAYCMMLDRVTHYLTVTNDMTRLDLARRCFYLKVCEKTESSDGAQGCTGWRRQVIAQLVQEWGWDTEKLAILNNRNSWKIEQVRTAHNELLDTMMQSYRNLIRFARRNNLSVSASPQDIGVLTRKLYAAFEALPGKITLVNPQISPDLSEQDLTFIYVPPGRANRSGWYLYNRAPTIESIIGHQPLEYNRYLNKLVSWTYFNGLLTEKTRLHIRNGDSQADKKNLADLVNDISTHFPIRLPAPTPKALYSPCEIRHLAIIVNLETDPTTRFSDQIVHFDFRKLDILSFGESQQCMVSSIDLLYRNSWNEVRTLHFNGEQSMLEALKTILGKMHRDAAPPASVEVFCYSRHLRGLICTRVRQLVSECIELRLSSNRQDLDRCKVLRISGQTWGLFFERLNVSVQKLENAVEFYNAISNTKLHGLPIRVDNKDKQLPSIIDGFACEGIIQFFFENIEGTQGFNIYILDESNKVEIYPHCEGSKEELVRDVSRFYSSSHDRFTYGSSFINFNLPQFYQIIKKGERTHVAPFMDGQSLLDHETESVTVLETGEAMRANSQYHSCHY

SEQ ID NO: 7730 - protein, 70 aa, Xenorhabdus sp.
MNKQFRWSLAIITLLSVTGCGLKGPLYFPPAEPAAPQVSVNTAQPAGHVSQDSTSNKNDTSKNNISASAQ

SEQ ID NO: 7731 - protein, 274 aa, Xenorhabdus sp.
MQFSKMHGLGNDFMVVDAVTQNVYFSPELICRLSDRHTGVGFDQLLVVEAPYDPDLDFHYRIFNVDGSEVSQCGNGARCFARFVRLRGLTNKRDIKVSTQAGQMVLSINHDDQVCVNMGEPVFEPQSVPFRANKAEKTYIIRVMERTVLCGVVSMGNPHCVIQVDNVDTADVEVLGPVLERHERFPERVNVGFMQVVSRNHIRLRVFERGAGETRACGSGACAAVAIGIQQGLLDKQVRVDLPGGSLQIRWDGPGQPLYKTGPATHVYDGTIHL

SEQ ID NO: 7732 - protein, 234 aa, Xenorhabdus sp.
MGKENEPLHTESMLDDQMVVDYLLDNPNFFIRNANAVDRIQVPHPVRECVSLMEWHMNRQRKRIGYLEDDLVHLVEQAKQNEILFNRLLQLLAELSAAESLQGFLSRLSAWAKTLGLSNCYIRLFSDKWLLGAPLNAPDLAISRNAFESVRIQRFGDSNHYLGRLHGPEILLLMPQARHVGSVAVSLLGMRGELGMVIFNSHDKQHYYEGMGTDLLDQLAKLLPGLLSRWVERA

SEQ ID NO: 7733 - protein, 298 aa, Xenorhabdus sp.
SLLEPVEAFLHHLRVERRLSPMTIINYRRHLTVLAEMSLEMGITEWQALDVTKVRMFAARSRRAGLQSASLALRLSSLRSFLDWMVTQEKMEANPAKVVSAPRKKQHLPKNMDVDEVNQLLNIDLNDPLSVRDRTMMEVMYGAGLRLSELVGLDCRHLDLESGEVWVYGKGSKERKVPVGRIALEWLQRWLVMRELFEPEDNAVFISTQSGKRMSTRNVQKRFEQWGIRQGVNSHIHPHKLRHSFATHILESSGDLRAVQELLGHANLSTTQIYTHLDFQHLAKVYDVAHPRAKRGKS

SEQ ID NO: 7734 - protein, 226 aa, Xenorhabdus sp.
MTFDLDDTLYDNHPVIDRTEKEVLCFIRQYDSKFSHFGREDLYVYRQAVLEMEPEIYHDVTLWRRQSAELMFSYHGFNREEAVRGADEIMSCFTYWRNQITVPKSTHNTLSVLAEKIPLVAITNGNAEPAECGLAPYFKFVLKAGVDGRSKPYPDMYHLAAERLALPANQILHVGDNLQTDVEGAILSGMQACWINIENKNLMQEPEGRLVPHVEISDLDSLIALI

SEQ ID NO: 7735 - protein, 721 aa, Xenorhabdus sp.
MDVSYLLESLNNKQREAVAAPRTNMLVLAGAGSGKTRVLVHRIAWLLSVEHASPFSIMAVTFTNKAAAEMRHRIENLIGTSQGGMWIGTFHSLAHRLLRAHHLDANLPQDFQILDSDDQLRLIKRIIKAMNLDDKQWPARQGMWYINGKKDEGLRPRHIESYGNPVEVTWLKIYQAYQEACDRAGLVDFAELLLRAHELWLNKPQILQHYRDRFTNILVDEFQDTNSIQYAWIRLLAGDSGRVMIVGDDDQSIYGWRGAQVENIQRFLKDFPAAQTIRLEQNYRSTSNILKAANALIAHNSDRLGKNLWTEGSEGEPISLYSAFNELDEARYVVSRLKNWLDNGGALKECAILYRSNAQSRVLEEALLQASMPYRIYGGQRFFERQEIKDALSYLRLVANRNDDAAFERVVNTPTRGIGDRTLDVVRQMARDQQKTLWESSQLLIQEKVLAGRAASALQRFIELINALETETQEMSLHVQTDRVIRDSGLWAMYQQEKGEKAQARIENLEELVTATRQFSYQDEDEDMMPLQAFLSHAALEAGEGQADAYQDSVQLMTLHSAKGLEFRQVFIVGMEEGMFPSQMSIDEGGRLEEERRLAYVGVTRAMEKLTLTYAESRRLYGKEVYHRPSRFVGELPAECVTEVRLRATVSRPVSHKRLGTPLSANDSGYALGQRVRHPKFGEGTIVNIEGSGEHCRLQIAFQGEGIKWLVAAYARLETGQ

SEQ ID NO: 7736 - protein, 316 aa, Xenorhabdus sp.
MLNAFKLENNRLLRLELEEGDTLSDSMWVDLVGLGDDDRLRVQNELGQILATRTELDDIEASARFFEDEDGLHVHSFFYFEDAEDHAGNSTVAFTIRDGRLYTLRERELPAFRLYRMRARNQIMVDGNAYELLLDLFETKIEQLADVIENIYSVLESLSRVIMNGKQGDEFDSALSNLAEQEDIGWKVRLCLMDSQRALNFLVRRARLPANQLEQAREILRDIESLLPHNESLFQKVNFLMQAAMGFINIEQSRIIKIFSVVSVVFLPPTLVASSYGMNFEFMPELHWTFGYPAAIGVMIAAGLAPYLYFKRKNWL

SEQ ID NO: 7737 - protein, 148 aa, Xenorhabdus sp.
MGPTASGKTALSIALRQHLPVELISVDSALVYRGMDIGTAKPSAEEQAQAPHRLIDILDPADVYSAADFRRDALEQMAEITAAGRIPLLVGGTMLYFKALLEGLSPLPSADPEVRAVIEQEAEEHGWESLHQQLQEIDPVAAARIHPN

SEQ ID NO: 7738 - protein, 651 aa, Xenorhabdus sp.
MAIRILPPQLANQIAAGEVVERPASVVKELVENSLDAGTTRIDIDIERGGAKLIRIRDNGCGISRQDLTLALARHATSKIASLDDLEAIVSMGFRGEALASISSVSRLTLTSRPEGQAEAWQAYAEGRDMEVTVKPAAHPVGTTVEVLDLFYNTPARRKFLRTEKTEFGHIDEVVRRIALARLDVAINLNHNGKLVRQYRPAKDESQHERRLAAICGTAFMQQALALSWQHDMLSIKGWVVDPKSSHTASDIQYCYVNGRMMRDRLINHAIRQAYQDLLQGEQQPAYVLYLEIDPHQVDVNVHPAKHEVRFHQARLVHDFIYQGVAAVLKQRSNGAELGLDCQEETTDWIPENRPSAGENHFLRQKQTASAGSTQKTSSSPRTASETPSSGHQAGHSGIRQPYQGESYQKKQGELYQKLMQFAPEEKQPLFPERSDAERKTSEKSASVTEKSPLMPARSTPVQGKNSSYSFGKVLSIYAPHYALLESASGIGLLSLPVAERWLRQAQLTPGEQGLKPQPLLIPLKLSLSETEVNVLRQNSELLKTFGIESTVAHGKVTIHAVSLPLRQQNLPKLFPALLGYLMEQSSVSVQQVAIWLARHLGSEHETWNIAQAVQLLADVERLCPQLVGSPPEGLLQLIDLQAVVALFNHE

SEQ ID NO: 7739 - protein, 430 aa, Xenorhabdus sp.
HWLMFFMLFVVLSQWVMTTAVASTLSNVHVSNSSSEATVTLGFTGGHPEYRFFPLHNPERLVVDIRQSAGITGLPMRLSGQNLVKIVRTSQPPDAQHKRVVLELAQKATATSVVKQSGNQYQIIFTLKAEGAVNSPSIFKENTASSEVSTPHKSKQSLTNKTAEVTSVMQETKPVSAHNAPVVKKQINKTAQGKYPIVIAIDAGHGGQDPGAIGPRGLREKNVTISVARRLEELLRNDPMFKPVLTRNGDYFISVAGRSEVARKHKANMLVSIHADAAPNRSARGASVWVLSNRRANSELGNWLEQHEKQSELLGGAGDALANGTDPFLSQAVLDLQFGHSQRVGYDVAVKVLQQLSQVGSLHKRTPEHASLGVLRSPDIPSILVETGFISNTSEEELLGSNQYQEKLAQAIHLGLRHYFQANPLQTAPK

SEQ ID NO: 7740 - protein, 154 aa, Xenorhabdus sp.
MKELVLSLPNENATVALGNSVAAACERGYVIYLYGDLGAGKTTFSRGFLQALGHQGHVKSPTYTLVEPYALQPRPVYHFDLYRLADPEELEFMGIRDYFHQDAICLVEWPQQGAGFLPNADIELHLAYNNEGRQAHFVALSEYGESLLDNLKSL

SEQ ID NO: 7741 - protein, 474 aa, Xenorhabdus sp.
TGKQYIENLRDGRTIFINGEKVTDHVDHPAFRNAIRSVASLYDYKIQHADTMTFRTETDEQMSLYWQLPSTPEKLIARGQAAYEWAKQTVGWLGRSPDNAAAVLTGMVTHIELFESYSQERADALRNYFAYVSENDLYLAYALINPQGDRSKTPGAHEKNIYHTLGVVEKNAKGIVVRGAKMVATGAALADEILVGSHKPMKKGVDERYALSFAMPINTKGIKIISRRSYEQGANPADYPLSSRFDENDSTIYFDDVLVPWERVFVCEDIEMCFKQVDSTATELLMDIQSIARYAVKLHFLAGMAQEMAENNGVSEYPPVKESLAQLASYAMNIEGLFKSVLHCPKIENGFYLPDKTLLYTYRVIGQSTYPNVLETIRKLAGGGILMMPSSQSDLENSEILSIIEKTQYSSIVSPAEKVKFMKLVWDAIGSEFASRHHQYELFYAGAHHQTLGRLYNQYDWGLSRELVEKIKAL

SEQ ID NO: 7742 - protein, 381 aa, Xenorhabdus sp.
SGHQGYVLIQTDNYDITTSVTGLVIMFLLLQFLLIFIGWCYRRLKRTGTFTHSWIFGGYKRKRARLQTRQALLKLAEGDFKQVEHLMTRNADHAEDPVVNYLLAAEAAQQRGDYFRTNQYIERAAEVADKDQLPVDITRTRIQLAQGETHAARNSVDKLLNTAPRHPEVLRLAEQAYMRSGAYQSLIDILPAIKKVGLHDEEQMSQLHQQAYIGLMNQVMAEKGSAGLKAWWKDQHRKIRNETALQVAMAEHLIECNDHETAQRIILDGLKQQYDDRLLLLLPHLKAGNSEVVQKSLSHLLKQHGETPLLNSTLGQVALRHGEWAKAETAFKAALAQRPDAHDYAWLADALDRLHKREEAAQIRTKGFMLTLKRESTSEEA

SEQ ID NO: 7743 - protein, 396 aa, Xenorhabdus sp.
MSIMTEQKKSTDAVEIQHPQQPEKAPRKSRNYGWVGSTLSIAIALAVGAGGLYLYYHNKQQNEALRAANLNLQTQVASLIQQQSVDKQDADSKIEQLKQGLQKEETKNQQQIEQVDSNMAELRDRVSAVTNSDVENWRLAQANFLVKMASRKIWGDQDIATALALLKDADNSLADMNDASLMPARSAIKTDMDTLSKIKQVDLDGIILTLNNLSNQVDNLPLVDKVEQGKPMDEDGKEISASLSDWRQNLSKSWHSFMDNFITIRPRDGSKEPLLAPKQEIYLRENIRSKLLIAAQAVPRRQIDTYRDSLESVSTWVNAYFDTSLPDTITFLEELKTLEKQPLSIEMPEQLSSQPILADLVRKRIYQPASQPLPEAQHQPKSENAPAQAETPVQEG

SEQ ID NO: 7744 - protein, 69 aa, Xenorhabdus sp.
MLRLLYNLVIEGDSAEGNANDSSNSKAWLLNCRLIVVSDRLASIARTLGWHVIKVAKSADNDALMQALE

SEQ ID NO: 7745 - protein, 337 aa, Xenorhabdus sp.
MTMKTIRIATRQSPLAMWQARYVQKQLKHFHPDLQVELIPMTTRGDIILDTPLAKVGGKGLFVKELELAMLENRADIAVHSMKDVPVEFPDGLGLVTICEREDPRDAFVSVEYASLNDLPTGSIVGTSSLRRQCQLRQLRPDLVIRDLRGNVGTRLSKLDNGDYDAIILAAAGLKRLGLEDRIRMPLAPELLLPAVGQGAVGIECRLDDMQTRELLAPLNHKNTEICVLAERAMNTRLEGGCQVPIGSYAIWQGDNIWLRALVGAPDGSNIIRGERTICSEKTSCSEKTSCSQSTISSDKAISSEEACQAGISLAEELLEKGARQILADVYQRDLPA

SEQ ID NO: 7746 - protein, 107 aa, Xenorhabdus sp.
MNMNDSEFHQLADQLMSHIEEQLDNYEGHADIDCETNGGVMTLSFDNGSKIIINRQEPFHQIWLATKNGGYHFDYRDNQWICDRSGNDFLYMLGQAITEQSGEPFLF

SEQ ID NO: 7747 - protein, 296 aa, Xenorhabdus sp.
MNEPQTAKGILYALGAYLIWGLAPIYFKEIQYVPPDEIVSHRVIWSVFFMVLMLTITRHWRQVLTVIKQPKNLLVLGITAFTIASNWLVYIWAVNNNHMLEASLGYFINPLVSVLFAMIFLGERFRRMQWIAVGLAFTGVFIQLWQFGSVPVIGLYLATTFALYGLIRKKLGVDAQTGMLIETIWVLPVALTYLLFFTHTPTSNMLNNTISLNLLLVAAGIITTIPLLFFTAAAAHLRLSTLGFFQYIAPTLMFLLATLVYGEKIGSERLITFGFIWAALIVFTLDALYTQRRLRK

SEQ ID NO: 7748 - protein, 187 aa, Xenorhabdus sp.
MNKEITRCGWVTSDPDYLAYHDNEWGKPLKDSQQLFELICLEGQQAGLSWFTILKKREGYRKCFHQFDPAKVAEMGENDVEKLMQDPAIVRHRAKINAIIDNARAYLKMAEQGENFSEFIWQFVDGAPQINHWETLAKVPAKTDLSDALSKALKKRGFKFIGSTTCYAFMQAAGLVDDHIANCCCRK

SEQ ID NO: 7749 - protein, 418 aa, Xenorhabdus sp.
MKFSQFGNKFTQESGITRLMNDLNQGLRTPGAIMLGGGNPAHIPEMDEYFQQLLADMALNGQLTETLCNYDGPQGKNTLIAALAQELQEKLGWDVNPQNIALTNGSQSAFFYLFNLLAGRDENGSIKRVLFPLAPEYIGYSDSGLDEGLFVANKPNIELLPNGQFKYHVDFDHLNISEDISLICVSRPTNPTGNVVTDEELLRLDALAQKHQIPLLIDNAYGVPFPGIIFSEATPLWNPNIILCMSLSKLGLPGARCGIIVANEKIIRAVSNMNGVISLAPGGIGPAMTLEMIRRNDLFRLSQNVIQPFYKKRVEQVIEIIRHYLPEEYCLIHKPEGAIFLWLWFKNLPITTEVLYQRLKKRKVLMVPGHYFFPGLEHNWPHAHQCMRMNYVPDLAKIEEGIRILSEEIEIAHQEVEC

SEQ ID NO: 7750 - protein, 205 aa, Xenorhabdus sp.
MLLSVLYIIGITAEAMTGALAAGRRKMDVFGVIIIASVTAIGGGSVRDIILGHYPLGWVQNPEYIVTVACAAVFTIWIAPMMKHLRRLFLILDAIGLIVFSIIGAQIALDMDYSPIIAAIAAVITGVFGGVLRDMFCNTIPLVFQKEIYAGVSFAAAWLYIALLHTPLHPNSVIIITLIAGLAARLIAIRYRLGLPIFNYDGADH

SEQ ID NO: 7751 - protein, 207 aa, Xenorhabdus sp.
MSQGTLYIVSAPSGAGKSSLIQALLNTQPLYDTQVSVSHTTRPARPGENHGEHYFFVTTDEFQNMINHDEFLEHACVFGNYYGTSRKVIEDTLASGVDVFLDIDWQGAQQIRQKMPAARSIFILPPSREELLRRLRGRGQDSEEVIAKRMSQAVAEMEHHGEYDYVIINDDFNTALADLQSVIRSERLRLERQAQRHDALISKLLAD

SEQ ID NO: 7752 - protein, 91 aa, Xenorhabdus sp.
MARVTVQDAVEKIGNRFDLVLVAARRARQLQSGGKDPLVPEENDKMTVIALREIEQGLINNKILDVRERQEQQEQEAAEINAVSAIADGRR

SEQ ID NO: 7753 - protein, 713 aa, Xenorhabdus sp.
LYLFESLNQLVLKYLPEDQIGLLKQAYIVARDAHEGQTRSSGEPYITHPVAVACILAEMRLDHETLMAALLHDVIEDTPTTFQDIEQLFGTAVAGLVEGVSKLDKLNFRDKKEAQAENFRKMVMAMVQDIRVILIKLADRTHNMRTLGSLRPDKRRRIARETLEIYSPLAHRLGIHHLKTELEELGFEALYPNRYRVIKEVVKAARGNRKEMIQKILSEIEGRLTDAGIKCTVNGREKHLYSIYRKMHLKEQRFHSIMDIYAFRVIVDNLDTCYRVLGQMHSLYKPRPGKVKDYIAIPKANGYQSLHTSLIGPHGVPVEVQIRTEDMDQMAEMGVAAHWAYKEQGESGTTAQVRAQRWMQSLLELQQSAGSSFEFIESVKSDLFPDEIYVFTPEGRIVELPAGATPVDFAYAVHTDIGHACVGARVDRQPYPLSQTLSSGQTVEIITAPSARPNAAWLNFVVSSKARAKIRQLLKNLKRDDSVSLGRRLLNHALGNGLKVADIPEENIARELARMKLTSLDDLLAEIGLGNAMSVVVAHNLLGETEKMPNSNGGNNNSNNNNSNNSRKLPIKGADGILITFAKCCRPIPGDPIISHISPGKGLVIHHESCRNIRGYQKEPEKFMPVEWDKDVNSDFIAEIKVDMFNHQGALANLTAAINDANSNIQSMNTEEKDGRVYCAFIRLTAKDRIQLANIMRKIRVMPDVLRVSRNRN

SEQ ID NO: 7754 - protein, 235 aa, Xenorhabdus sp.
MNPKRYARICQMMAMRQPDLTICLEEVHKPHNVSAVIRTADAVGIHQIHAVWPTQQLRTQLSSAAGSNSWVQVKTHSSVEQAINQFKTAGMQVLATNLSDKAVDFRQIDYTKPTCIIMGQEKKGISKQAIALADYDIVIPMAGMVQSLNVSVASALILYEAQRQRQLAGMYQREESMLSEEDQQKLLFEGGYPVLAAVSHRKGLERPLVDKQGQIIASESWWAAMQATTTPSAGK

SEQ ID NO: 7755 - protein, 693 aa, Xenorhabdus sp.
MKGRLLDATPLTTLRGVGASQVGKLAKLGLVNLQDLLLHLPLRYEDQTRLYPINEVLPGIYATVTGKILRTNVVFGRRRMMTCQISDGTGMLTLRFFNFTAAMKNSLADGKHIIAYGEIRRGSQGAEIIHPEYKIQQHAERIHLQETLTPIYPTTEGVRQTTLRKLIEQALELLDTCAVNELLPEQFSRKIISLSNALHTLHRPPPDISLADLESGRHPAQRRLILEELLAHNLSMLAVRAGAQRFQAQPLTADNSLKQRLLALLPFSPTRAQDRVVAEIEHDLEKEVPMMRLIQGDVGSGKTLVAALAAVRAIVHGKQVALMAPTELLAEQHANTFRQWLEPLGIQVGWLAGKQKGKARQAQQEAIASGQVSMVVGTHAMFQEQVKFAGLALVIIDEQHRFGVHQRLALWEKGHEQGFHPHQLIMTATPIPRTLAMTAYANLDTSVIDELPPGRTPVTTVAIPDTRRNEIIQRVKNACLDEGRQAYWVCTLIEDSEVLEAQAAQVTSEELALALPELKIGLVHGRMKPAEKQTIMEAFKRGELQLLVATTVIEVGVDVPNASLMIIDNPERLGLAQLHQLRGRVGRGAIASHCVLLYKTPLTNTARIRLQVLRDSNDGFVIAQKDLEIRGPGELLGTRQTGNVEFKIADLLRDQSMLPEVQRIAHYIHQHYPENAKALIERWLSDRSQYSHA

SEQ ID NO: 7756 - protein, 33 aa, Xenorhabdus sp.
MKLTVRAFFPVAKQVWPQRACHKYPDDTFMYPI

SEQ ID NO: 7757 - protein, 461 aa, Xenorhabdus sp.
MATSTRENSALETLKKSDSELIYRLEDKPHLPHAVFAAFQHLLAMFVAVITPAMLICQALGLPAEDTQRIISMSLFASGLASLIQIRSWGPVGSGLLSIQGTSFNFVTPLIMGGLSLKNGGADVPTMMAALFGTLMLAATTEILLSRVLHLAKMLITPLVSGIVVMIIGLSLIQVGLTSIGGGYSAIQQGTFGAPENLFLAGIVLAIIVLLNRQHNPYLRVASLVIAMTVGYLAAWYMDMLPHAATTEDKPIITVPAPLYYGLSIDWHLLIPLILIFMVTSLETIGDITATSDVSEQPVCGPLYMKRIKGGVLANGVNSMISAVFNTFPNSCFGQNNGVIQLTGVASRYVGYLIASMLILMGLFPAVAGFVQHIPEPVLGGATIVMFGTIAASGVRIVSREPLNRRAIMIIALSLAMGLGVAQQPLILQFAPEWIRNLFSSGIAAGGLTAILLNLIFPQEK

SEQ ID NO: 7758 - protein, 591 aa, Xenorhabdus sp.
MMKWLGKGFAVLLLLLILAIIAVYFVAQTHWGAKKISRWINKQGHYQVNIESINHSWLQPMTLMLNNVSLSDKQGSFSLNANTVDLDFKWQAPTKLTNLRKLTLQDGKLILSGSEFTQALKTDVLQLNKMDVQLTTPSSQIQGKNIVGGITPWSPDKNTLFGSGQYQFSANNININGLSFDKVVMQGSYQNNNLVINSFGAEFLQGLISGNGQQLADGSWNLENILINDIRWQSPMTLAELTEKTRHLSAIHIKDLNLTNAKLQGKDWSADYLNTSIKGLGLVNGQWQAEDGLIDFNAMNMAFNEAQFKDILGQFSFSGDIFTIANLTTHYQKGLFNIKAQWDRKNHQLTLNDSSVTGLIYSLPSEWRDYIKNPAPEWISALKLNNVSIHNTLLIDTNPDFPFQLTTLSGYVDTLDILKDGHWGLWNGKASLQAMSGTFNKIEVVRPYLQLHATDDKVIIDKMNTFSGDGILQFNGFLEQLAAQKPFQLNVKGMSVDLGILPQWGWIPLHLHGEGNFSLAITGNLSADNLKSTINGTLTAEDKASNKESQSVKQGVISTDNCPAGQSDTEQSGEAGQPNGDQSKTCATVVL

SEQ ID NO: 7759 - protein, 469 aa, Xenorhabdus sp.
MSVEHVLSMIEEHQVKFIDLRFTDTKGKEQHITIPAHQIDEDFFEDGKMFDGSSIKGWKGINESDMVLMPDPSTAMLDPFFDDATLIIRCDILEPGTMQGYGRDPRSIAKRAEDFLRSSDIADTVLFGPEPEFFLFDDVRFGSSISGSYYHIDDTEAAWNSGTRYEGGNKGHRPGIKGGYFPVPPVDSSQDLRSAMCLTMEEMGLVVEAHHHEVATAGQNEVATRFNTMTKKADETQIYKYVVHNVAHAFGKTATFMPKPLVGDNGSGMHCHMSLSKGGVNLFAGDKYGGLSEMALYYIGGIIKHARALNAFTNPTTNSYKRLVPGFEAPVMLAYSARNRSASIRIPVVASSKARRIEVRFPDPAANPYLAFSALLMAGLDGIINKIHPGDSMDKNLYDLPVEEAQEIPTVASSLEEALAALNADREFLTRGGVFTDDAIDAYIGVLNSEIERVRMTPHPLEFELYYSV

SEQ ID NO: 7760 - protein, 349 aa, Xenorhabdus sp.
MAMADFPKAEQILDSLINSVLVLDNDLIIHYANHSAMQLLAQSTRKLFGTPLPVLFSYISLDTEFMRSSLIRGHGFTDNEVILVINNHSHVMSLSAQPISEQFILLELAPMDSQRRLSQEQIQQAQQVAARELVRGLAHEIKNPLGGLRGAAQLLAKTLPDPSLREYTQVIIEQADRLRTLVDRLLGPQHPGAQISQSIHHVVERVYQLVSLEMPSNITLVKDYDPSLPELSHYPDQIEQVLLNITRNALQALGDQKGTITLRTRTAFQITLHGERYRLAARIDIEDNGPGIPPNIQDMLFYPMVSGHEGGTGLGLSIVRNLIDQHTGKIEFTSWPGHTEFSIYLPIKK

SEQ ID NO: 7761 - protein, 43 aa, Xenorhabdus sp.
MQRGKIWIVDDDSSIRWVLERALSGAVGWYLKCNRCCLYTLDV

SEQ ID NO: 7762 - protein, 689 aa, Xenorhabdus sp.
MTQQTFLVEIGTEELPPKALRSLAESFAANFETELNNANLGHGEVRWFAAPRRLALKVANLAAAQADREVEKRGPAISQAFDAEGKPTKAAEGWARGCGITVDQAERLVTDKGEWLLYRAQVKGCEAKELLAGMVSSSLAKLPIPKLMRWGDKETQFVRPVHTVTMLLGSEVIEGEILGIKSDRIIRGHRFMGEAEFTIDNAEQYPVILQERGRVIADYETRKTLIKRDAEQAATELGGVADLTDSLLEEVTSLVEWPVVLTAKFEEKFLEVPAEALVYTMKGDQKYFPVYDKSGKLMANFIFVTNIESSDPQQIISGNEKVVRPRLADAEFFFKTDRKQRLEDNLPRLETVLFQKQLGTLRDKTDRIQALAGWIADKSGADVTHATRAGLLSKCDLMTNMVFEFTDTQGVMGMHYARHDGEAEDVALALNEQYQPRFSGDELPSTGVSCAVAIADKMDTLAGIFGIGQHPKGDKDPFALRRAALGVLRIIVEKKLPLDLQTLAEEAVRLYGDKLTNAKVVDDVVEFMLGRFRTWYQELGYSVDTIQAVLARRPTQPADFDARMKAVTHFRTLDEAVSLAAANKRVSNILAKSEEKLSDAVQASVLKAAEEIQLATHLVVLKEKLAPLFAEGNYQDALVELASLREVVDAFFDNVMVMDEDLQVRVNRLTLLSELRDLFLRVADISLLQ

SEQ ID NO: 7763 - protein, 307 aa, Xenorhabdus sp.
MQKFDTKTFQGIILTLQDYWARQGCTIVQPLDMEVGAGTSHPITCLRALGPEPIAAAYVQPSRRPTDGRYGENPNRLQHYYQFQVIIKPSPENIQELYLGSLKELGLDPTVHDIRFVEDNWENPTLGAWGLGWEVWLNGMEVTQFTYFQQVGGLECKPVTGEITYGLERLAMYIQGVDSVYDLVWSDGPLGKTTYGDIYHQNEVEQSTYNFEHADVDFLFTCFEQYEKEAQELLALETPLPLPAYERILKAGHTFNLLDARKAISVTERQRYILRIRTLTKAVAEAYYASREALGFPMCNKNGVTEN

SEQ ID NO: 7764 - protein, 429 aa, Xenorhabdus sp.
MIFKERQITFDNRSHQITNINIWTPDSQWLVYDVRPNGASFSGLTIEKIHINNGQTEVIYQAKDGAHVGVVTVSPQEPVRYAFIHGPEHPDNHWQYDFHHRRGVIVSDSEPNVAFNIDALDITPPYTAGALRGGTHVHVFSPDSSRLSFTYNDHVMHELDPALDLRNVAVAVPLRTVISAKKHPREYDGRYFSVVVSQTTTHPHPGSDEINRAYEEGWVGQQGYLKENGQWQRWALTFIGDTYAENGEKIPEIYLVDLPEHDEDYALEGCQPLAGTETALPAPPAGVKQKRLTFTHQNCYPGVVNVPRHWLRASPDGSKICFLMRDGNGVIQLWHISPNGGEPVQITDNIHDIQSAFNWDNRGRFIAFVCDNSVMLCDSQSGQTQRLTARTDVAPCADAIVFSPDDRYIAFMRDIDGYRQLFIVETGLK

SEQ ID NO: 7765 - protein, 537 aa, Xenorhabdus sp.
ADCPVWSKEKLQLEIEHLTPQVARWEQLYRQQGISEIDDEIYDQLLETLTHWQHCLDQTQNNNVVIAIPDNGKQTHPVQHTGLRKLKGLEEMRKWVQGRSKVWLQPKIDGVAVTLVYQKGLLTGLISRGNGTEGTDWLDKSKFISSIPQQIKNAPEYMVLQGELFWRQNNHRQSVVGSQGARSKVAGLMMRKAHSEELSQIGIFVWSWPDGPDEMTAKLEQLASMGFPATQQFSHPIFNAEEAEEKWKMYFTHPLPFATDGVVLRQETEPAGRQWRSGSNSWAVAWKYPLQQQVTTVNDIQFRIGRTGKISVLLELEKIQLDDRQVSRVHIGSVTRWKYWDVYPGDKVTIALAGHGIPKLDKVVWRIAERKHLNLPDAEQFHSLSCFVLNNDECQQQFIARLTWMGEKLKMRGVSQGTWMTLVTSEKIKNLTDWLALDVTQLAEIPNIGTKRAESIFSQFQQSKRQPASLWREAIGMPYANKFTNKIALFGKMQSPEVETQKYSALSVKQRAKIERFFQHPDVKELIEVLTLQGIDL

SEQ ID NO: 7766 - protein, 403 aa, Xenorhabdus sp.
MYHLDIYGTLVAATLVLLLGRKLVQSISFLEKYTIPEPVAGGLLVAFVLLAVKQFTGWEVSFDLSLKDPLMLAFFATVGLNANLASLRAGGKLLLIFVVAVVGLLLVQNTVGIALAKMLGLDPLMGLLAGSVTLSGGHGTGAAWGKVFTERYGFENATEVAMACATFGLILGGLIGGPVARLLVRNDKTPGLENDDAEVPSAFEKPYTGRLITPLVMLETIALISICLLVGNYLEKVLEDTLFLPTFVCVLFTGVILSNGLSLLGFYRVFDRAVSVLGNVSLSLFLAMALMSLKLWQLASLALPMLVILAVQAVVMALYAIFVTYRVMGKNYDAAVLSAGHCGFGLGATPTAIANMQAITDRFGPSHVAFLLVPMVGAFFIDIVNAAIIKIYLMLPIFPSVTG

SEQ ID NO: 7767 - protein, 322 aa, Xenorhabdus sp.
MHAPRLHTTTRKEGAVSMYHLRVPQTEQELETYYQFRWEMLRKPLHQPVGSEKDAYDSMAHHQMVVDEKGRPVAVGRLYINADSEGAIRFLAVDPNEQQKGLGTLVAMALESVARQEGVKRIVCSAREDAVDFFNKLGFQNRGLINGANSSPINHFLMIKPIMSLDDILHRPDWCAQLQQAWYKHIPLSEKMGVRITQYTGQRFITTMPEAGNQNPHHTIFAGSLFSQSTLTAWGLIWLLLQERQLGGEIILVDANIRYQKPIVGRPSAVADLNNMSGDLARLARGNKARVKLEVHVSGEQGLGSVFTGTYIVLPAERAAAA

SEQ ID NO: 7768 - protein, 133 aa, Xenorhabdus sp.
VVVDSQTIGEIEQGLLVFLGVEKEDDQQKVQRLCEKVMGYRVFSDENGKMNLNVQQANGSLLVISQFTLAADTQKGLRPSFSGGAEPKKADELYRYFVEQCRATGVKTEMGQFAADMKVSLTNDGPVTFWLQV

SEQ ID NO: 7769 - protein, 205 aa, Xenorhabdus sp.
MLYIFDMGNVIIDIDFRRVLAVWSNLSGTPLAVLAPRFALGEAFEKHECGQITDAEFAETLCDEMEVSLSFEQFSEGWNAIFVGVRQEVIELMNKLREQGHRVVILSNTNRLHFQYWPQQYPEVTTSADHLYLSQDLGIRKPNQDIFKYLLEKEGVAAEQAVFFDDVQENVEAAKRLGLKAIHVSGRDTIPDYFKTHDFSPLTVT

SEQ ID NO: 7770 - protein, 605 aa, Xenorhabdus sp.
INNLRNIAIIAHVDHGKTTLVDKLLQQSGTFGERAATAERVMDSNDLEKERGITILAKNTAIKWNDYRINIVDTPGHADFGGEVERVMSMVDSVLLLVDAMDGPMPQTRFVTQKAFAHGLKPIVVINKVDRPGARPDWVVDQVFDLFVNLGATDEQLDFPIVYASALMGIAGNEHTEMAEDMTPLYQAIVDHVEPPKVDLDGPFQMQISQLDYNNYVGVIGIGRIKRGTVKPNQNITLIDSEGKTRNGKVGKVFSHLGLDRIESDKVEAGDIIAITGLGDLNISDTLCEVNAVEALPALAVDEPTVSMYFCVNTSPFCGREGKYVTSRQILDRLRKELVHNVALRVEETEDPDAFRVSGRGELHLSVLIENMRREGFELGVSRPKVIFREIDGRKQEPFEQVTLDIEEQHQGDVMQALGERKGEMRDMLPDGKGRVRLDYVIPSRGLIGFRTEFMTMTSGTGLLYATFSHYDDIRPGEIGRRQNGVLISNGQGKAVAYALYGLQERGKLFLGHGTEVYEGQIIGIHSRSNDLTVNCLTGKKLTNVRASGTDEATTLSPHIKKTLEQALEFIDDDELVEVTPESIRLRKRHLTENDRRRASRSKDA

SEQ ID NO: 7771 - protein, 67 aa, Xenorhabdus sp.
LDHMAETLASGERIEVRGFGSFSLHYRAPRVGRNPKTGDKVELDGKYVPHFKPGKELRDRVNIYGDS

SEQ ID NO: 7772 - protein, 658 aa, Xenorhabdus sp.
EGKYIFPALYASVLWDPSIPQNFSTPLCAGQKWLVTMKLRAVHAQLNQGSYDSQRYALSIRQPLNGKITKANLLDDTCSVRQKLIYRLIPEIRSLKHAGIALALTFGERAWLEKQTRLLLQQTGIAHLMAISGLHVAIASLFGWAFARGIQFLLPASWVGFRFPLLVGWLTAMLYGWLSGWGLPAIRAMLGLTVWIYLRCRNHFCFSWQWVLWSAALILLFDPLAILSDSFWLSFFAVVALLFWFHWMPLPERIRYGWRWVWLRGLHMQLGMMLMLMPLQLLLFQGINIASLIANLWAVPIISFLTVPLIMLILLSVLLPFSQFIQPFFWQLVDYTISFALMPLPAFVHSWTETGHIPFFITFAGWMSVVVWRFGWWKSYIGLLFAFAGITFCYFKRDDEYLWRFSMLDVGHGLAIVIDKGGKAILFDTGNRWETGNMAEKVIQPYLRWHQLTPEQIILSHDHLDHTGGVEYLHKKNPDIHIRSPSSKSENLPCVRGEQWVWHGLTFRVIWPPEKAENVGNNQSCVIRIDDGKYSLLLTGDLEKQGEYQLIGLEKENLNSTVLQVPHHGSNTSSTAAFIRRVRPEYALTSVARYSPWKLPSMKVKDRYKNAGIQWNSTAVSGQITGYVYHDHIKLEGYRQQLMSRWYHQWFGIRGDHE

SEQ ID NO: 7773 - protein, 581 aa, Xenorhabdus sp.
MNDKDLSTWQTFRRLWPIITPFKAGLLVAAVALVINAAGDTLMLSLLKPLLDEGFGKADMSVLKWMPLVVIGLMLMRGISGFVSSYCISWVSGKVVMQMRRRLFNHMMGMPVAFFDQQSTGTLLSRITYDSEQVASSSSGALVTVVREGASIIGLFALMFYYSWELSLILIVIAPIVAGVIRLVSVRFRRISKNMQNSMGMVTTSAEQMLKGHKEVLIFGGQKVETQRFNKVSNHMRQQGMKMVSADSVSDPIIQLIASFALAFILYAASFPEIMGALTAGKITVVFSSMIALMRPLKSLTNVNAQFQRGMAACQTLFTILDMEQEKDDGKREIKKAKGDLEFRDVTFCYPTKESPALKNISMEIPAGKTIALVGRSGSGKSTIANLLTRFYDVSEGSISLDGHDLREYTLSSLRNQIALVSQNVHLFNDTVANNIAYASEGQFSREEIERAAEMAYAMDFIKKLDNGLDTMIGENGVLLSGGQRQRIAIARALLRDSPILILDEATSALDTESERAIQAALDELQKNRTSLVIAHRLSTIESADEIIVIEDGNIIERGNHNVLLEKNGAYAQLHRMQFGL

SEQ ID NO: 7774 - protein, 332 aa, Xenorhabdus sp.
MIERIWSGRSWLYILLLPLSALYGLVSGLRKLGYKSGLFRSWKASVPVVVVGNLTAGGNGKTPVVIWLVEHLQQKGYRVGVVSRGYGGKSEHYPLLVTDEVTTGQAGDEPVLIHRRTGAPVAVAPKRIDAVKKLLEHSSLDIVITDDGLQHYALQRDYEVVVIDGARRFGNGYWLPAGPMRELSGRLNTVNTIIVNGGTAETGELPMTLKGEIAVNLLTGEKRKISGIPNAVAMAGIGHPPRFFAALQQFGVDLQATHAFADHQSYEKVQLLALTNTGQNLLMTEKDAVKCGRFAQDNWWYLPVSAYLPEVQGEKLLDEICALIPQPTKGRT

SEQ ID NO: 7775 - protein, 59 aa, Xenorhabdus sp.
MDHRLLEIIACPVCHGKLSYDKENFELICKIDRLAFPFRDGIPVLLEHEARALPTEEKK

SEQ ID NO: 7776 - protein, 247 aa, Xenorhabdus sp.
FTVIIPARFASSRLPGKPLADIHGKPMIVRVMERAIRSGAGRVIVATDNQAVFDAVTAAGGEACMTSENHHSGTERLAEVIDKYQFADDEIIVNVQGDEPLIPEQIIKQVADNLAGSDAGMATLAVQIQNAEEAFNPNAVKVVMDAQGYALYFSRATIPWERDRFMQSKETIGDNFLRHIGIYAYRAGFIRRYVQWESSPLENIEMLEQLRVLWYGEKIHVAKALQAPGAGVDTPEDLEVVRKTFAA

SEQ ID NO: 7777 - protein, 261 aa, Xenorhabdus sp.
MRDRNFDDIADKFSRNIYGTTKGKIRQAVVWQDIEELLNHLPQRSLRILDAGGGEGNMACQLAELGHQVILCDLSEEMIQRAKSNAEERGVLQQMQFIQSPVQDIHQHITQPVDLILFHAVLEWITDQKDVIEILGDIITPGGALSLMFYNANGLVMRNAILGNFHLATPNIQRRRKRSLSPQNPLIPEQVYQWLTELNMEIVGKTGVRVFHDYLQSRQLQNTDFPALLELEQRYCRQEPYISLGRYIHVTARKPTLKSEL

SEQ ID NO: 7778 - protein, 408 aa, Xenorhabdus sp.
MAIAVLNNERLDGEMSEGELIDAFREVCKGFEQTSEAVAVRANNAINDMVRQKLLNRFTSELADGSAIYRLTPLGIGISDYYIRQREFSTLRLSMQLSIVANELHRAAEAAEEGGDEFHWHRNVFAPLKYSVAEIFDSIDLSQRIMDEQQNSVKADIAALLNQDWQAAIANCEQLLSETSGTLRELQDTLEAAGDKLQANLLRIQDANMMSGGSELVDKLVFDLQNKLDRIISWGQQSIDLWIGYDRHVHKFIRTAIDMDKNRIFAQRLRQSIQNYFDNPWVLNVASAERLLDMRDEELTLRNEEVMGELPPEMEYEEFNEIHEQLAEMVEQALAIYQQAKLPLDLGAVLRDYLAKYPHKRHFDVARILVDQAVRLGVAEADFSGLPAEWLAINDYGAKVQAHVIDTY

SEQ ID NO: 7779 - protein, 240 aa, Xenorhabdus sp.
MSSTHIEQFMPVKLAQALSNTLFPELDSQLRSGRHIGMDNLDNHAFLMDFQEELETFYSRYNVELIRAPEGFFYLRPRSNTLISRSVLSELDMMVGKILCYLYLSPERLSNQGIFTFQELHEELLSLADENRLMKLVNQRSTGSDLDKQKLQEKVRTSLNRLRRLGMAYFLQNDSNKFMITEAVFRFGADVRSGDDPREAQLRMIRDGEAMPVESSLSQEGNEHEEAPTDSAAGAEDEQS

SEQ ID NO: 7780 - protein, 1485 aa, Xenorhabdus sp.
MIERGKFRSLTLVNWNGFFARTFDLDELVTTLSGGNGAGKSTTMAAFVTALIPDLTLLHFRNTTEAGATSGSRDKGLHGKLRAGVCYSTLDVVNSRHQRIIAGVRLQQIAGRDRKVDIKPFMIQGVPASIQPTQLLTENINERQARVLPLNELKERVEEMDGVQFKQFNSITDYHALMFDLGVIPKRLRSASDRSKFYRLIEASLYGGISSAITRSLRDYLLPENSGVRKAFQDMEAALRENRITLEAIRVTQSDRDLFKHLITEATAYVSADYMRHANERRVHLDEALALRSELFGSRRQLVTEQYRHVEMARELTEQSGASSDLEMDYQAASDHLNLVQTAMRQQEKIDRYQADIEELTYRLEEQTEVVEEAKEMQAEYEVASEAAEQEVDELKSQLADYQQALDVQQTRAIQYQQALQALERARELCQLPELSAENADEWQETYQAKEQQATEILLALEQKLSVADAAHSQFEQAYQLVKNIVGEVSRSEAWHSAREVLREWSSQRHLSERVQPLRIQLAELEQRLNSQQNAERMLEEFCKRYQQQYQPEDLEMLQGELEAQLEELSLTANESGESRMQVRQELEQLKQKIQALTARAPVWLAAQETLDQLCEQSGENFENSNDVTEYMQQLLEQEREITVERDNVSTQKRELEKQIERLSQPSGAEDSRLLALAERFGGVLLSEIYDDITIDDAPYFSALYGSARHAIVVPDLSLVRPHLEALEDCPEDLYLIEGDPQSFDDSVFDFEEQENAVLVKSSDRQWRYSRYPEVPLFGRAARENRLEALSLERDTLAERYATLSFDVQKIQRAHQAFSRFVGKHLSVAFDSDPELEIRTLNHRRTELERELSQFESHTQQNQQKLAQVKESLSVLNRLIPQITILLDEALIDRVEAVREEMSEAQDAARFLQQHGNTLHKLEPIVSVLQSDPRQHEQLQRDYEMAKHSQIKAKQQAFALTEVVQRSVHFSYSDSAGMLSENSDLNDKLRQRLEHAESDRRRAREQLRQQQSQSAQFSQVLASLKSSYDTKQDMLKELEQEMKDIGVQADANAENRARERRDQLHAAVQANRSRVNQLEKQIAFCEAEMENLQKKLRKSERDYYQKREQVVSSKAGWCAVMRMVKDNGVERRLHRRELAYMDADALRSMSDKALGALRLAVADNEHLRDALRLSEDPKRPERKIQFFVAVYQHLRERIRQDIIRTDDPVDAIEQMEIELARLTEELTAREQKLAISSKSVANIIRKTIQREQNRIRMLNQGLQMVSFGQVGGVRLNVNIRESHAVLLDVLSEQQEQHQDLFNSQRLTFSEAMAKLYQRLNPQIDMGQRLPQTIGEELLDYRNYLELDVEVNRGSDGWLKAESGALSTGEAIGTGMSILVMVVQSWEEESRRLRGKDISPCRLLFLDEAARLDAKSIATLFELCERLQMQLIIAAPENISPEKGTTYKLVRKIFNNQEHVHVVGLRGFGQETPAIEQRQEQAQAIF

SEQ ID NO: 7781 - protein, 237 aa, Xenorhabdus sp.
MRKVVLALSATALAVGLSSTAQAKVQVPEQVSSGVTTVELSQRQAVHWVSVEQIEKSLQSKPPMSVGFDIDDTVLFSSPGFYRGQLEYSPNDNSYLKNPEFWEKMNNEWDKFSMPKQVGIDLVHMHLKRGDDIYFITGRTRTKTETVTKYLQEDLHIPADKMNAVIFAGDDPGKNNKISWMRDHNLKIYYGDADADIAAARELNIRGIRILRASNSSYQPLPKAGKFGEEVVINSEY

SEQ ID NO: 7782 - protein, 182 aa, Xenorhabdus sp.
MNNIDHNRRKWLGVSMVALGLGLLPQHALATLTTPRPRILRVDNLHTGETIKAEFFDGRHYNKSELIRLNYLFRDYRQNETKKIDPKLFDQIYLLQMMMGTNKPVQLVSGYRSLKTNNMLRHASSGVAKHSYHTRGQAMDFHIDGMELSHIRKAALKMKAGGVGFYPKSNFIHIDTGPVRTW

SEQ ID NO: 7783 - protein, 210 aa, Xenorhabdus sp.
MKYHIMPVTVAMQNCTLIWCDETLEAAIVDPGGEAEKLIAEIERRGVKLTQVLLTHGHFDHVGATVDIAKHFNIPVHGPHKGDAFWIEALEVQCQMFGVEECPSFTPERWLDDGDTVKVGNIQLSVLHCPGHTPGHIIFANHADKLISMGDVLFKGSIGRTDFPGGNHDELIQSIKEKVLALGDDYQFIPGHGPMSTLGHERKTNPFLQN

SEQ ID NO: 7784 - protein, 108 aa, Xenorhabdus sp.
VKETRSDINRQYDLVDIIFLFVSAIMAGAEGWQDIVTYGQAKIKWLKEYRTFSHGIPCRHTIARILRAIELDSLLEALLNWVNEQRELGGKPVMSLYGREARCAFLPY

SEQ ID NO: 7785 - protein, 62 aa, Xenorhabdus sp.
VASKGADEILRDFTEYATHESSREKLQQQYSDTWKSLEGHPDLQEKCKEVTGIRFKELKQAA

SEQ ID NO: 7786 - protein, 99 aa, Xenorhabdus sp.
VIFGKLAEIAGEYLKKGSQVYIEGQLQTRKWQDQQGQDRYSTEVVVNIGGTMQMLGARQESQQPPQQHTRQQQQSQGWGKPQQPQSAPPMDFDDDAIPF

SEQ ID NO: 7787 - protein, 295 aa, Xenorhabdus sp.
MNNLVETFIDVDDFCRFFIPQWEQFCLNKGYRLRRRKGHMYPSEIMTILILFHLSHYRDFKNFYLEHIWRYHHHDFPTLLSYTRFISVAPSVLVPLCSYLTQLKGNPTGIAFIDSTRLSVCHNIRIPRHKVFEGTAQRGKTSMGWFYGFKLHLIINHLGEILALKITAGNTDDRKVVRELAKELIGSLYGDKGYLSQELANDLAQNGVTFITKKRSNIKASVLEDWDKIMLSRRFIIETVNGQLKYICQIEHSRHRSIKGFLLTVLTGLIAYCHKKKKPSLKVFYSEEEDIPVTA

SEQ ID NO: 7788 - protein, 758 aa, Xenorhabdus sp.
NKSTVPGVHPYHGPAGGWGALKATAIAVRTQMDAFVAPKTLLNTNQPDGFDCPGCAWPDKEHNSTFQFCENGAKAVTWEATKKRVTPEFLAENTVSTLLEKSDYELEGYGRLTHPLAYDAATDTLVPVSWEAACRRIGEILREIPSPSEVEFYTSGRASNEAAYLFQLFAREYGTNNFPDCSNMCHEPTSVGLPQSIGIGKGTVSLDDFDKTQLIISIGHNPGTNHPRMMGTLHEVARRGVPIVVFNPLRERALERFTDPQNMIEMATYSSTNIASSYYQVKAGGDAAALKGIMKVLLEWDEKRGNILDHEFIATHTMGFDAVKEELRGTSWQDIENESGISQADIENVALLYANSDATIVTYGMGITQHNKGTANVRLIADLLLMKGNIGKSGAGICPLRGHSNVQGNRTVGITEKPSPEFLQKLEEVFGFKPPYEHGHDAVKAMQAMVDGRVKALLCLGGNFAVALPDPELSFSAMKKLDLSVHIGTKLNRSHLLVAKETFILPCLGRTELDIRELGRQSITVEDSMSMVHASSGKLTPASPLLKSEPVIVAEMAAATLLNSKTPWLRYTESYDLIRDLIEKTIPGFDNYNQRIRTPGGFRMPLPPTERIWPTPTGKAMFSVFKGVKENADVLGEDVLRLMTIRSHDQYNTTIYALDDRYRGVFGRRDVLFMNDVDLEARDLKHGDKIIIETVSQNRKLFLKDITVISYNIAPGTVAAYYPEANILIPLDYIDEESGTPSYKSVPVRVFSQQDKSA

SEQ ID NO: 7789 - protein, 115 aa, Xenorhabdus sp.
MRKFALLTYALVLFGFTQPVKALSESEAEDLADLTAVYIYLKYDCGYSQIPDREIRRTVVYFAQRNKWDLGNYDGQLMEELNQQGYNDLKGIDLPHEVKCRSLARRSLSLLAYVK

SEQ ID NO: 7790 - protein, 264 aa, Xenorhabdus sp.
LRKLKLHGFNNLTKSLSFCIYDICYAKTKADRDSYIAYIDEQYNANRLTEILSETCSIIGANILNIARQDYDPQGASVTILISEEPVDPKLVDNTENPGPLPDSVVAHLDKSHICVHTYPESHPDGGICTFRADIEVSTCGVISPLKALNYLIHELESDIVTMDYRVRGFTRDINGVKLYIDHEISSIQNYVTEEIQSQYHMMDVNIFQENLFHTKMMLKEFDLNEYLFNTTAEELNETEKQEIIHLLKKEIQEIYYGRNLPEI

SEQ ID NO: 7791 - protein, 268 aa, Xenorhabdus sp.
MLFLLKKYVGALLMPLPLIILIAFVALFLLWFTRWQKTGKTILSLSWLTLLLLSLQPVADNLLLPVEGKYTQRYEPDAIHAPAVKYIVVLGGGFTYNPEWAPSANLISNSLPRVTEGIRLYRLNPGAKMIFTGGKGVNSISSAEIAAMVAQSLGVPVADTIALKNPLDTEEEAAEVEKVIGQQPFILVTSANHMARSLKFFEQRGMHPIPGPANQLAVTTPLYNWEKYIPSPHYFSHTERAWYETLGSIWQAIKPSGTDKGEKSESGN

SEQ ID NO: 7792 - protein, 114 aa, Xenorhabdus sp.; identical to SEQ ID NO: 5702

SEQ ID NO: 7793 - protein, 439 aa, Xenorhabdus sp.
MSQQWTSRLGHILAATGSAVGIGAIWKFSYVSATNGGGAFLIVFLLFSFVIGLAVLLAENILGSSTSEVAVNAFKKLLGKHWGWVGFIGVLSSWCIYSFYSVVGGWTIGYTVMAGTGQLNITDTSQLTSIFNNFISDPWWPIIAHLAFSGLTCYVVLSGVQKGLEKAVKVMMPMLFLIMIMLIIVGIRLPGSSEGLKLFLYPDFNNLTGKGILDALGLAFFSLSIGLGIHITYSSYLPSNKGICRSSIWVVILSCLVCVLAGLMIFPALAAAGLQPNAGPGLTFMTMPIYFASLPGGSILAVTFFLLLLMAALTSAISLLEHIVAYVQSRFKWRRRKASLVVTASIMLMGIPVSLSFGPLSHVTLGGKTIFDMLDFITSNVLMPLFGIIICLVFGWSHKANALIPENMPSRSRQCLLFIWRYVGPLCIGVILVHGLMPD

SEQ ID NO: 7794 - protein, 53 aa, Xenorhabdus sp.
MTFAPSRGAEYTISPSMVNLQAGEHVWNADAALLLTAVELDTCAGTVSVWGLA

SEQ ID NO: 7795 - protein, 441 aa, Xenorhabdus sp.
MAHRLSSKDILALGFMTFALFVGAGNIIFPPMVGLQAGENVWIAAAGFLLTAVGLPVITVIALAKVGGGIEALSSPMGKTAGLILATVCYLAVGPLFATPRTATVSFEVGIAPITGGGKLPLFIYSVIYFLLMILISLYPGKLLDNVGRILAPIKMSALVILGIAVILWPAGNPIPATDVYQEMPFSNGFVNGYLTMDTLGAMVFGIVIVNTVRSRGVESSALLTRYTIYAGLIAGLFLTLAYLSFFKLGEGSGALVPNAENGAVILHAYVQNTFGNYGSFLLAVLIFMACMTTAIGLTCSCAEFFSRYLPLSYRAMVLLLAFFSMLVSNLGLSHLITFSIPVLTAIYPPCIVLVLLSFTSGLWNNFSRILAPAMLVSLMFGVLDAAKASNYLVHFLPEWATHLPLADQGLAWLIPTLSSVGIFAIYDLIVAERKIPKHEV

SEQ ID NO: 7796 - protein, 446 aa, Xenorhabdus sp.
MTHRLSSKDIWALGFMTFALFVGAGNIIFPPMVGLQAGEHVWVAAAGFLLTAVGLPVITVIALAKVGGGIEALSSPIGKTAGLILATICYLAVGPLFATPRTATVSFEVGIAPLTGSGDLPLFIYSVIYFLLVILVSLYPGKLLDSVGHVLAPIKIAALVILGGAAVLWPAGHPIPAIETYQEIPFSNGFVNGYLTMDTLAAMVFGIVIVNAARSRGVESSSLLTRYTMWAGLIAGLCLTLVYLSLFKLGEGSGDLVPTADNGAAILHAYVQNVFGNYGSFFLAILIFIACMVTAIGLTCACAEFFSRYLSLSYRTLVLLLGLFSMLVSNLGLSHLITFSIPVLTAIYPPCIALILLSFTNRWWHNFTRILAPAMLVSLMFGILDAIKSSHYLSHLLPEWATHLPLADKGLAWLIPTLLSVVVFALYDRIAGEAKLPKHEIQQGQS

SEQ ID NO: 7797 - protein, 79 aa, Xenorhabdus sp.
MQSRCIEQSPDKLYQFSESLQPADKRTVQVKQRGGRKAREAVCELRYAPVTLKMPVTQQPPTKVGGLVINGLKVRIRIG

SEQ ID NO: 7798 - protein, 220 aa, Xenorhabdus sp.
MFQTHAEQWADETFSRANLGDSRRTKQLIKFTVSLANHIGQSIVQSLKTPADIEAAYRFTRNQAINATAIAEAGFAATAEHAKSYDCLLALEDTTSLEFTHQTVRKEMGYTTSRKSATGLHAHSVLLFAPKEERLIGLIEQTRWIRALSQYGKKAQRASRPYKDMTGLPPSSRCSLTQFSNASSKESNSIARSILAMVCRQGIPWEKVRYSFNHLILAWP

SEQ ID NO: 7799 - protein, 99 aa, Xenorhabdus sp.
VPKDPKEREQYLNELVAAISNKTPHPAIMSAKERVLAERLFNINYKSSFNPPLPQHMQEQRDEEIRQGWREYWSKNSKEHDHYRGESPRRHNGGIWTGD

SEQ ID NO: 7800 - protein, 319 aa, Xenorhabdus sp.
VEKNRMGIDLSIIWFVIIIFATLMYIVADGFDLGIGIILPFTKDPTERDVMVNTVAPVWDGNETWLVLGGAALYGAFPLAYSVIIDALTIPLTLMLVGLIFRGVAFEFRFKALPEHRAFWDRAFIGGSLLATFCQGITVGAVINGFEITGRHFSGSALSWLAPFPLFCGLGLIIAYALLGSSWLIMKTEYRLHRKMCSLTVYLALALLAVIAVISIWTPLAHADIALRWFSLPNLYFLLPVPLLVLASTWCLVRSAYNYGNYAPFFLTLLLIFLGFSGLGISLWPNIIPPSVSIWDAASPPQSQGFMLVGGLLINPNSV

SEQ ID NO: 7801 - protein, 460 aa, Xenorhabdus sp.
MFGLDAFHLARIQFAFTVSFHIIFPALTIGLASFLAILEGLWLKTKEESYLKLYHFWIKIFAVNFGMGVVSGLVMAYQFGTNWSGFSQFAGSITGPLLTYEVLTAFFLEAGFLGIMLFGWNKVGRKLHFFATCMVAVGTIISTFWILSSNSWMQTPQGYHIENGIVIPDNWLQIIFNPSFPYRLLHMSVGAFLASALFIAACAAWLLLRGKDTAPVRKMLSMALWLILIIAPIQAVIGDAHGLNTLEHQPAKIAAIEGHWSNTSGEATPLILFGIPDMNEEKTKYALEVPYLGSLILTHSLEKQIPALKSFPPEDRPNATIIFWSFRIMAGLGMLMILLGVAGVLLRRKQKIYRSRAFLRFVLLMGPSGLIAILAGWFTTEIGRQPWVVYGLQRTKDAVSAHGDMQMSLSLLLFILVYFSVFGIGYFYMMRLVKQGPEEIASPSHSEMQQPFSGEKQNGY

SEQ ID NO: 7802 - protein, 274 aa, Xenorhabdus sp.
MCHVTQPTLSMRLRNLEKELDVILIKRSSRFEGFTEEGEKILKWAKTMQSAYEGLQAEAANFRQQLLGQLRIGIVPLTNIEPMLMLQHLSETFTEIRFQVSSGHSEKIIDDLNSNRLDIGICYLEKADTHQHDIYSLKKTKLGLLFNRTQFTPATPTVTWEMVATLPLALISQANYFRQSIDLAFQRYNLQPKIILESDSTLHLIQSVNSGFCASIIPITEKMEKLSDNIDIIPIEDAVINAALGILIRREEPRSVLIETCFANMCDYVEYINI

SEQ ID NO: 7803 - protein, 115 aa, Xenorhabdus sp.
MKGTSGADVIDALAPIGAKREIVSPKRFYGAFDGTNLGAIFEQHGVTEVVLTGQHTDCCVRHTAYGAFVRGYDIKVLSDAVCVFLQADQNEALNYLKSIYGVEITTSTELGVYSL

SEQ ID NO: 7804 - protein, 296 aa, Xenorhabdus sp.
VINLTNDIFIDVVSDALSGKRDSLVMRLRMVTKKLKKESPELATKLESLLMQTSGAYAVERAQPITPRATPVDADTRQKLLVETYPVILDVEPVWPTSTSLALNRFVIEWEMKELLHKEGLHPSRSLLMGGPPGVGKTLAAKWLASKLNMPLLTLDLASVMSSYLGKTGNNIRSVLNYASSFPCILLLDEFDAIAKKRDDATDVGELKRLVTVLLQSIDEWPNTSILIAATNHSELLDTAAWRRFDRVINFEYPTNDLIQRYLISKEIAESLAHYISSRLGEISYAVIEKSINQAK

SEQ ID NO: 7805 - protein, 745 aa, Xenorhabdus sp.
LKYYRGSTTLPIKIQSEDPHGESPTSVKFVGNVDIQQGNKTLTADRVRFEQTEAKDPVRTLHAAGNVRYDDPQIILKGPRAWANLTTIDTDVEQGKYQMVGRQGRGSANKMMLRGENRYTILDNGVFTSCLPGNDSWSVIGSEVILDRQEEVAEIWNARFRVANVPVFYTPYLQLPIGDRRRSGFLIPNASFSNKDGIQFILPYYWNIAANYDATITPHLISKRGLKLDNEFRYLTKAGSGTVALDWINNDRVYEDDKIERNRERSSNSRWLFYLNHGGVMNQVWRFSADYTKVSDPDYFTDFSSQYGTSTDGYATQKFSIGYAQQNWNATLTTKQFQIFTAKVNGDTKAYRATPQLDLNYYKNDLGPFDFRTYAQFAKFTSVGKEQPNATRWHVEPSINLPLSNGWASLNNEVKLMATHYQQDIPAAQKTSDLEKSVNRVLPQFKSDAQMVFERAMYFKPGFTQTLEPRVQYLYVPYRNQNNIYDYDSSLLHTNYTGLFRDRFYSGLDRISSANQFTSGITTRIYDEDLVERFSFSIGQIYYFEAPRVKDVNSDGQTQSPIDASNNRRTGSTTWASDVEWNINSSWGFKGGVQYDTRLSQVSMGNSVVEYRRDADRLIQLNYRFVNRDYIRATLKNPPAYQQGISQVGVIGSWPLTDRWAVVGAYYYDTKEKQPASKMLGMQYSTCCWAVNVGYERKIVSWKDNQSEYDNKWSLNIELRGLSNNHSLGSQKMLQQSILPYQRSF

SEQ ID NO: 7806 - protein, 432 aa, Xenorhabdus sp.
MKNWRTLILGLMFAMNTAIAAPQEINKVAAIVNNDVVLESDVNNLLESVKNNARLSGQQIPDEKTLRHQILERLIMDDIVLQMAKQMQLTIPDADVDSTIENIAAQNHMSLAQMKQSLAAEGMSFDTYRNQIRKEMLIAEVRNNEVRRRISILPQEVDSLVNQLSSHNDQNTELNVSQILIPLPENPTHAQVEKAEVTVNKILSDLKKGGDFGKLAIAYSSDTQALKGGNMGWNRLQELPSLFAEQLQSAQKGQVIGPIRSGVGFHILKVNDIRGGNAPVAVTEVNARHILLKASPVMTDDQARDKLRQLREEILSGKTTFEQAAKEYSEDPGSAMRGGELGWNVPSAYDPAFRDALVKLKKGEISQPIHSAFGWHLIQLLDTRKVDKTDAAQKDRAYKLLFTRKFNEEAQTWMQELRASAYVKILDGNDAK

SEQ ID NO: 7807 - protein, 180 aa, Xenorhabdus sp.
MMLATEELRVALATTHLPILDVPKAITFDSLREVVTILNHDLKTKFGIPCPHIYVCGLNPHAGENGHMGREEIDVIIPALESLRAEGIWLEGPLAADTLFQPKYLDNADAVLSMYHDQGLPVLKYQGFGRAVNITLGLPFIRTSVDHGTALELAGTGQADVGSFITALNLAIKMIQNSNE

SEQ ID NO: 7808 - protein, 276 aa, Xenorhabdus sp.
MNNKVHQGHHARKRFGQNFLTDQYVIDSIVDAMNPQPGQAMVEIGPGLAALTEPVAARLDKMTVVELDRDLAARLQVHPKLKDKLTIIQQDAMTVDFGEIAKELGQPLRVFGNLPYNISTPLMFHLFSFTDAVADMNFMLQKEVVNRLVAGPGSKAYGRLSVMAQYYCHVMPVLEVPPTAFTPAPKVDSAIVRLIPHKAMPYKSIPHPVQDIRMLARITTQAFNQRRKTIRNSLSDLFSPEQLSDLGVDPGTRAENISVEQYCKMANWLSSQSETV

SEQ ID NO: 7809 - protein, 58 aa, Xenorhabdus sp.
VGEQPVIPPGTEYRYSSGAVLETPLGTMEGHYEMIDHLGNPFRVTIPVFRLAIPTLIN

SEQ ID NO: 7810 - protein, 278 aa, Xenorhabdus sp.
MATYLIGDIHGCYRELVALLQQVDFDPDRDTLWLTGDLVARGPDSLAVLRYVKQLGSAVRLVLGNHDLHLLAVYNKISRNKPKDQLDELLTAPDVDELINWLRKQPVLQIDDELKLVMAHAGLTPQWDLETARICADEVEAILRSDSYPLFLNAMYGDMPNSWSPKLSGLSRLRYSTNVLTRMRYCFPNGQLDMICKSKPENAPAPLKPWFELPRKIPEDYSIAFGHWAALEGRGTPADIYALDTGCCWGGNLTLLRWEDKQYFSQPAFATQSDDSDS

SEQ ID NO: 7811 - protein, 307 aa, Xenorhabdus sp.
VPYGLTCQELLLAHSRLIPLFCSASSQQRCLAYLRGLLSDVERKNGWQLAEWLGEHSPDGIQYFLERAHWDAEAARDILRDYVTAYLGDEQDILIIDETGFIKKGTHSAGVQRQYSGTAGRIENSQIGVFLCYAGNGGHTFIDRALYLPKQWTEDRLRCDAAGISDSVSFATKPQLAQNMLARAFKANIPCRWVTADAVYGQDRRLRCWLESQHQPFVLAIPKNERLWWQTPHYTRADTIAASLTADDWEKQSAGLGTKGERWYDWARIPLWRLQVSEEERRYGHYLLIRRNRDEKQELAYYVVYAL

SEQ ID NO: 7812 - protein, 63 aa, Xenorhabdus sp.
MLSMPFKEQADLKMLIQVAGHRWEIESGFEETKGECGLAHDEVRQWHSGYFPSASIFSLPPKR

SEQ ID NO: 7813 - protein, 293 aa, Xenorhabdus sp.
VTLKELMQEFQLSRSSTLRYISALEELGVPLYSERGRNGGYVVAPTYRLAPVRFSADEIHAMLFAISGMHVLQSTPFNLQFRSISEKLKQVLPQDEKIKDEKLRKCLGVRTVRQINPIKHLDMLLNHIFQQKNLEVIYCDKKVFLYPIAIWFESGKWFLAVFDYEAQDLRVLRCHSIQSFNPTAGQSVVPENIRLTDFNLSNFEQLRQKQQQHYFEITIKRSGIDHYHSKSFSHISLKLTDDGALISGYYHQEELGYLLDYINGFSQHLIDIKPKTLKRMYIDEIQMRLKQLE

SEQ ID NO: 7814 - protein, 233 aa, Xenorhabdus sp.
ISPVINMQKLTRVYQHDGEGQVPVLNNITAQIYAGQSCAIVGTSGSGKSTLLNILGLLDKPTSGEYFLCGVDMSSADADMRARMRNKEIGFVFQSFHLLAGMTATENVALPLLYRGISASQAHKIAREKLGLVGLSHRESHYPADLSGGQRQRVALARALVGEPSLLLADEPTGNLDPQTAEEILSLLSTLHTDNAMTLVVITHDAMVANHMQRELRMSDGQLHEIRGTTMHA

SEQ ID NO: 7815 - protein, 387 aa, Xenorhabdus sp.
MMWREAWRNLMATGKSSLLALSGIAIGCASVVAFLNTGHNATLAALKMFSGLDINVITTNFYSYNHGIDSEAIKIDALKTAIPSLSSAAPWIYYSSPVRYNGKTEHFTLIGSTAALEEVMLLQLRHGRFISDYDRHSPYLVMGNDVAVSLVGEDTSQILGKQIQLGNYLYTVIGVFETKGQNPIFPFSLDSVVVIPLETMRKISQHAQLNGLITRSATTSTTEADAENLSAFFKNKFPEVEINVRVAQQLLQGQTEQGKTFTFMLIGLAGISLLTGGIAISNVMLMNVSARRKEIGLRMALGARALDIRRLFLYEAAVLTFTGAILGTLVGIIVAFLFVLYSGWSFSLAPISIPLGIGSAVIAGLISGFYPAHKASQMEPVQALRDD

SEQ ID NO: 7816 - protein, 325 aa, Xenorhabdus sp.
VNNAPVLLAKLREQTNRLNLKSTISESITQIILAYHALLRAQEQQALSAASLKRMQKLVETNKELIDAGRMAQTDIIQTQADLAMQELSAKEAENNVHAAKLTLLKLLALSLKTPIHATDTLKGTYVRLDVEQSIKKAQAQQPGYLTQLLSAKTADIQLLQARDNQLWDLSLVGRTSQYRSSSADTRNWENYIGIQLDIPIGDMTKQQTEVQARVDVQKQALHLEEARINLEQRVTNAIRDTESRWQEYQLAIKASSLSQQKLEIEKEKLQAGRSSNFQVLSFETDLRNAENARLNTLIQYLNAQAELDQILGTTLESWEITINE

SEQ ID NO: 7817 - protein, 274 aa, Xenorhabdus sp.
MVMELKNNLAKTQALFSRGIVPRMEVENLEQQLRRQLTELASAKDDLTSTRQKGSASHVQVAEMELKNTTSRYQALQEQYAHKEIKAPFSGVILKAQQGEKGKSFAIQTGVRVTEGMPLLEIMDTTQFQVLAQVEEADLVKLKEGLPVKISGEGFSGYSMYGKIETIAMQSSGNDQPGTAVYYDVVIKVTSPINTNYLIRPGMSAKVSIVIYHNEQGVVIPEKALSRDNDGNLSVSWRPDLKNQATSRQITVGEAMPEGLEIHGLEKGFIALSP

SEQ ID NO: 7818 - protein, 51 aa, Xenorhabdus sp.
VVYESGRTDKIILKKGIPVYLDTQQGLEPHKDINPGEHLLNITVVELMSAQ

SEQ ID NO: 7819 - protein, 145 aa, Xenorhabdus sp.
MRHNISEVDILFVAGFGPITQDFSKSKNFYQDTLGLPLKTMDGNNDYLLIESVTLTGVKHFALWPLYQAALSCFGTEQWPQDLSIPQSWIEFEVADLDTATNILLTKGWQLLVNNRQEPWGQRVTRLLSPEGMLVGVTVTPWLHD

SEQ ID NO: 7820 - protein, 159 aa, Xenorhabdus sp.
ISLIAAMAMDRVIGLDNAMPWTIPGDLAWFKRNTLGKPVVMGRVTYESIGRPLPGRLNIIISRQPGSDDRVTWVSSIEEALAAAGDVEEIMVIGGGKIYEQFIPLASRMYLTHIDAEVIGDTHFPDYEPDEWSSVFTEYHDADERNSHGYCFEILERRQ

SEQ ID NO: 7821 - protein, 60 aa, Xenorhabdus sp.
VKVRSAKPEAKAYKLTDGEGMVLLVHPNGSKYWRLRYRFGGKEKMLALGKYPLCHCRTSS

SEQ ID NO: 7822 - protein, 88 aa, Xenorhabdus sp.
MNNNIRTDWHQADIIAALRKRGTTLAAVSREAGLSSSTLANALSRQWPKGEWIIANYLGIHPSEIWPSRYFDKQGRLIERKVRDKPQE

SEQ ID NO: 7823 - protein, 183 aa, Xenorhabdus sp.
KNEQIRQGKTPDNWTVNKRCQKDTEATWTKKHGKRYFGYKLTLNVDTKYKVIRHIATGTAAVHDSQFFEAVLDRSNTRRDIYADKGYASQKRERVLKEQGYRVHIQRKAARNKPLSHCQKGRNKKIAKTRARVEHIFGSLSQMGEKIIRTIGQLRANFAMTMKATCYDLQRLVYFGKSGIHAF

SEQ ID NO: 7824 - protein, 43 aa, Xenorhabdus sp.
VRKNHIFESVFTDGKIQYHLQGIKPVASHCGKGYVGYYEGKEI

SEQ ID NO: 7825 - protein, 186 aa, Xenorhabdus sp.
MSVPAFGLGTFRLKDDVVIASVKNAIELGYRAIDTAQIYENEAAVGQAIKESGVVREDIYITTKIWTDNMGAEKVIPSLKESLAKLGTDYVDLTLIHWPSPNNAVSLEETMSALLEAKKMGLTREIGVSNFTVALMQQAIDAVGAENIATNQIEVSPYLQNRYVTGWANLNFISQGDNAINPFSSP

SEQ ID NO: 7826 - protein, 40 aa, Xenorhabdus sp.
VKAADINIPQGVLDELSSTFSKNVAIGNRYPDATQGLLNG

SEQ ID NO: 7827 - protein, 369 aa, Xenorhabdus sp.
MKENKIVIVGAGFVGATLAWYLSNHYLSSGDKSKIILIDKGLLGNGVTKQSFAWLNVSHGKPGADRKLRQQALNEWHELDKQTNGKLSVNWCGAISWQETEYATRQFIDNHNKSGFKITSLTKDELLMLEPQLSYYPDTAAFAMEEGAVDPIHATQFLLQEAINNGVTYLPETEVTSINHNGKQITGVTTSQETIHAEQVVLTAGVGTISLMETLGETAYLSSSPSIIVQYQHQANIPFVRHIISTPDLEVRPVSGTRLLAAEDYISDQPEHSAMCIAQKALTLIKESFIGSDSLCLEQASVGIRPMPDDGMPIVGKVADYQGLYMISMHTAITLAPLICRLAQEEIINGTEQAELKPFRIARFVSGNK

SEQ ID NO: 7828 - protein, 300 aa, Xenorhabdus sp.
VVAFLSLINCAYTVFATVLKGYFADTLSASMKAKIFSLNYTFVNIGWTIGPPIGTWLLMYSANFPFWFAAFSAAFPIVFIQRYVQRVRTAENNQNSATKWDPAVMLRDRALVWFILSTFLGSLVFGSFIVWISQYVLTVADSTLAEAVIGVVLPINAAVVVTLQYAVGRRIRPENLKNLMTLGSVFFFIGIAVFMFADKNLYLWGIAAVIFTLGELIYAPDEYMLIDNIAPEGMKSSYFSAQTLGFLGGAFSPMLSGIVLTELPPHLLFIIQMGLVVLAWLSMLKGMSIKPLSAVQPRQS

SEQ ID NO: 7829 - protein, 542 aa, Xenorhabdus sp.
MNINLENRPDNGKVVIGVDVGTGSARAGIFDMNGNMLSSAKRDITLYRDNTHFVEQSSREIWDAVCYCIREAMSHSGCVPQQVAGIGFDATCSLVVLGKDQEPISVSQSKDPNRNIIVWMDHRATVQAEHINALGHSVLDYVGGKISPEMETPKILWLKENHRESFDNAWQFFDLADFLTWKSTSSLSRSTCTVTCKWTYLAHEKRWDADYFRKIGLSELADENFYRIGQNIIEPGTPCGQGLTESAAKQMGLLAGIPVAAGMIDAHAGGIGTVGINGDATRNMAYVFGTSSCTMTTTLEPVFIPGVWGPYFSAMVPCMWLSEGGQSAAGAAIDQLLSFHPAAIAAKAMAKEKQKSLPVFLADRVLEKTQSASQAVELAKGIHVVPEFLGNRAPFADPHARAVIAGLGMEDSLDNLLSLYIAGICGIGYGLRQIIEAQAKSGATIDNIVISGGAGQHPLVRQLIADTCDVTVIATQACEPVLLGSAILGAVAGGVCKSVGEAMSRFSNIDCTYEPSESYREHHNIRFTSFQSLQQCARELKG

SEQ ID NO: 7830 - protein, 244 aa, Xenorhabdus sp.
SFMAISLENKVAAITGAASGIGLECARILIEAGVKVVLIDRAKERLMQLVSELGENAIPLVIDLMKPEQVDGILDEILKKAGRLDIFHANAGAYIGGPVAEGDPDVWDKVLNLNINAAFRSVRAVLPHFIEQKSGDVLFTSSISGVVPVVWEPIYTASKFAVQAFVHSTRRQMAEHGVRVGAVLPGPVVTALLDDWPKAKMEEALENGSLMQPIEVAEAVLFMLTRPRNVTIRDLVILPNSVDL

SEQ ID NO: 7831 - protein, 78 aa, Xenorhabdus sp.; identical to SEQ ID NO: 4965

SEQ ID NO: 7832 - protein, 280 aa, Xenorhabdus sp.
MVRIIILKHFHNLSDEKMEYQLLDRMSWQRFCRLTDVINIPDRNTIWCFEKRIGQEGARALFEEAKHQLSAQGFIPRGGQIIDATLIPVPKQHNKKEENEQIRQGKTPDNWTVNKRCQKDTEATWTKKHGKRYFGYKLTLNVDTKYKVIRHIATGTAAVHDSQFFEAVLDRSNTRRDIYADKGYASQKRERVLKEQGYRVHIQRKAARNKPLSHCQKGRNKKIAKTRARVEHIFGSLSQMGEKIIRTIGQLRANFAMTMKATCYDLQRLVYFGKSGIHAF

SEQ ID NO: 7833 - protein, 416 aa, Xenorhabdus sp.
IPQQQRLSLLSVAIVHMGMLTALDQFMLGAVLGNAMALTDAFIAIFIGSLIFGIITFGLGFAGMREGLSGSLLARWCGFGRIGSVLIGLVIAVSLLGWFGIQNAIFAKSLNFACGDKLGFSLAAIISGTILTTLVAFGFKALRFTARIAVPMFILLVVYISTIVLSGDSGQNWYEIMQLPHSDETLSISAGITIVVGGAIVASLMTPDLTRYTKSGQHVFGITLLTILAGEFVINGLAILIAKALNTADVVTIMSQATGGAGLFVVVFSTLRVNDLNLYSSSLGVINAVEGVTGKKLRYPPTTIVIGILGTLFSILGILDRFVDFLTVLGVVFPPILGVMLVDYYILRSYRKVLDESRQKGQLPPETPVIGWAAIIASLVGSIIGLTVEWGIPALNSLLIASGVYWFTKSALKRLP

SEQ ID NO: 7834 - protein, 374 aa, Xenorhabdus sp.
LSNTFGHLTDPRLNRTKQHLLIDILTISICAVICGCESFNAIEEYGKSKEDWFRQFLELPNGIPSHDTFNDVINRLNPQEFGEAFIAWVNKLAKISTDIIALDGKTMRGTLDKANGSPAIHLVSAWAVANQLCFGQMKVSDKSNEITAIPKLLALLDIAGSTITIDAMGCQHTIANQIVTDKADYVLALKGNQGEFYDDIKLFLDNQLAKDFTGVIHGTYRSTDGDHGRIEQRQLWLINDVNWLQKRHPQWHTLGGIAVVESWREEQGKTESYERRYYITSHRGASAEFLACAIRSHWHIENKLHWQLDVSFGEDSRRLRSGHAAENVALMNKIALNLLKNEKSVKIGVKTKRQKAGWDNGYMMKILTVGFSSV

SEQ ID NO: 7835 - protein, 276 aa, Xenorhabdus sp.
MSKLLSKYHKPDKNKRTQHISPEIANWGYVHFDVYELDTGESITLAASENETCLVLVAGKATVNTAQQRFEQIGDRMSPFERKKPYAVYIAPHEVIEIIAETHLELAICQAKGKGNYPTRLITPQDIGAEQRGNGHNRRYVHNILPDHQPADSLLVVEVYTDEGCTSSYPSHKHDTDNEPQETYLEETYYHRLNPPQGFCLQRVYTDDRLLDETMAVYNKDVVMVPRGYHPVATIAGYDSYYLNVMAGPTRKWLFTWEADHQWVNSDRYAEKHSKN

SEQ ID NO: 7836 - protein, 294 aa, Xenorhabdus sp.
VQLGINPLTWTNDDLPSLGAETSLETCLSEGRQAGFAGFELGNKFPRQSQILGPILASHYLKLVSGWYSGQLLTRSVEEEIAAVQPHLTLLRELGATVMVFAEVTDCIHGDQTKPVHLRPLFPAERWQEYGEKLTEFARYTQSHGVQIAYHHHMGTVIESAKDINRLMENTGEEVGLLLDTGHLTFAGDDPLTVAKRWGKRINHVHCKDTRPEVLEDVKNRKTSFLDAVLSGVFTVPGDGCVNYSDIFNVLRDNDYHGWLVVEAEQDPAVAHPLTYATLGYKNLHRLAKDAELM

SEQ ID NO: 7837 - protein, 655 aa, Xenorhabdus sp.
QHKKFDVICMGRIAVDLYGQQIGARLEDMTSFSKYLGGSSGNVAYGTARQGLKSSMLARVGDEHMGRFLREELERVGCDTSHLITDKERLTALVLLGIKDKETFPLVFYRDNCADMAITRDDFSEEYIASARCLAITGTHLSHPKTRAAVLTALQYARRNGVKTVIDIDYRPVLWGLTSLGDGETRYIASKQVTAQLQEVLSQFDLIVGTEEEFHIAGGSKNTLDALRSVRKLSSATLVCKRGALGCSVFTGNIPETLDEGITIQGVKVEILNVLGAGDAFMSGLLRGYLNNESWEQSCAYANACGALVVSRHGCAPAMPDKTELDNYIVRAKKLASTATGYRPDLDIHLNHLHRVSSRHKQWQELCVMAFDHRIQFVEMAREVNASLDLIPPLKKLLFQASQEVSTEANLKGHSGILCDSTFGQDVLDAATGQGLWIGRPIELPGSRPLCLEHGNIGSQLVSWPLEHIVKCLVFFHPEDNSTLRLEQEEIVKEIYAACCQSGHELLLEVILPSGMTRSDEFYLRALKRFYNLGIKPDWWKLPPMQSTTWDQIEDLIMQRDPDCRGVVILGLDAPAKTLKAGFNAAAGKSIVKGFAVGRTLFGKASQKWLAGEIDDETLVLQVKKNYHNLINDWRQRDEKNAKEELNPQYTGEPS

SEQ ID NO: 7838 - protein, 377 aa, Xenorhabdus sp.
MKEIRIGLIGAGYIGRTHAIAYAQASTVFPLKGKLVRAMIAGITPELAQTQAKELGFLRPTGDWRELVADPDIDVVDICTPNYLHKEMALEAIKHGKHIYCEKPLALNSHDAKQMVAAATIAGVKTLVGFNYMKNPTAQLAKEIISNGEIGEVVHFYGTHNEDYMADPLSPIHWHCFKNEAGLGALGDLGAHIINMAQYLVGDITTVCGDMKTIVKVRPEISGSSVLIPVENEDQAHAMVRFDSGAIGVIETSRIACGRKMGLTYVVTGTKGTLSFTQERMAELKLYRHDEPVNRQGFKTILVGPEHPDYAPFCHGAGHGIGFNDQKTVEVKDLVDGIALDQDIWPDFTEGWKVSRILDAIVCSHEQKRWVNVTEIN

SEQ ID NO: 7839 - protein, 558 aa, Xenorhabdus sp.
LSFIGFTLLVAGIAYYKTRNKHLIDSTEGYFLGGRSLTGVYIGSSMLLMNLSTEHLVGLNGLAFRTGFIVMAWEVIAALTIVLFAIYFLPKYLKLGISTIPEYLERRFDKNTLLITSVLFLAMYVISLLPIVLYTGAIALESLFQVSQVFNVDKTTALWIMVWGVGGLGAIYAIFGGIKAIAVADTINGIGLIIGGGIVTIFALLYVGDGSVWQGLTDVYQAHPDKFNSIGSEDSLVPFSTLFTGLIISNMFFWCTNQSIVQKSLGAKNLAEGQKGVMLCAVLKLLIPSIIILPGVIAFHIFNGQIDNPDNAYPALVQLVLPKILVGFFAAVVVGAVFSTFSGGLNSSVTLFTVNIYKQRINPNASEARSVAVGKYLGIALALVTMLIAPLVANAPDGLFYLIQQLQGIFNAPILSVVLVGLMTKRVPPIAAKLGLLFGMSAYIVCNFILHIDIHFFHLVGILFVLNVIFMLTVGYFFPAESYEEVYTKQVDITPWSMVKPMGWLITLAAVSMYVFLAQNVPNYVMTLYYLFAAGILGYVAYQISKVLSKRSIHRESA

SEQ ID NO: 7840 - protein, 328 aa, Xenorhabdus sp.
MFNIALFGAGRIGLVHAVSIASHKETCLYSVVDPYQVNAETLAQKYQVKIQTTEEAMSDPEVHGVLIASATDTHADLIEQAARNNKMIFCEKPVHLELERVQQCLAVVKECQVPLFVGFNRRYDPQFRQMKNLFHAGKIGKAESLMITSRDPAPPPAEYIRVSGGMFRDMTIHDFDMARFIIGEEPCAIYAQGSNLVDPAIGSAGDIDTAFIVMKFPSGAMVSIANSRRSGYGYDQRLELHGEKGLLTAGNIKENSVELWGDNGCLSAKPEHFFLQRYREAYIAEWDHFVDVMAGRATPETTGFDGEQALYLADKALESLLSGKEIKL

SEQ ID NO: 7841 - protein, 588 aa, Xenorhabdus sp.
LQIYQGCNEQGMAHIATGFSRQKKRRQIFAVTSSVGPGAANMVTAAATATANRIPLLLLPGDTFACRQPDPVLQQVEQYWDGTISTNDCFRPVSRYWDRISRPEQLMAAMIQAMRVLTDPADTGAVTICLPQDVQGEVWDYPDYFFQKRVHHLERRLASLSRIQDAVELIKRKKKPLLICGGGVRYSGAHEAFRQFAETFNIPFAETQAGKSAIVAAHPLNCGGIGTTGCLAANLLAKDADLIIGIGTRFTDFTTASKSLFQNPQAEFLTINVAEFDAYKLDAVAVIADAREGLSAIIQALAKTGWHSGWQQEVAQAKSVWQEELSRLFSIQYQAGDRPEIADHLDEKLNEYSDTLQTTLAQTRVLGLMDQYLEDNAIIVGAAGSLPGDLQRLWQPKEPDTYHLEYGYSCMGYEIAAALGAKIACPNQPVYAMVGDGSYMMLHSELQTAIQENIKIIVLLFDNAGFGCINNLQMSQGMGSFVTENRYRNQQSGRLDGALVPVDFAKNAESYGCKSYRVHNEQQLITALQDARKQPCATLIDIKVLPKTMTHDYESWWRTGTAQVADNPAITTAAENIRRYVEKYTRQY

SEQ ID NO: 7842 - protein, 307 aa, Xenorhabdus sp.
GVFNVVQGDKEAVDVLLTDPHVQAVSFVGSTPVAEYVYATASSHGKRCQALGGAKNHSILMPDADLDMAVNAIIGAAFGAAGERCMALSVVLAVGDEIADELVTKLRQQIDRMVVGAGISEGRENDMGPVISEQHRSKICDYINSGVEQGAKLLVDGRGYQVTGHEKGYFVGPTLFDYVTPEMKIYKEEIFGPVLSIVRVPDYHTALKLINHHEYGNGAAIFTRDGETARQFSEDVQAGMVGINIPIPVPMAFHSFGGWKRSIFGPLNVHGNDGVRFYTRMKTVTSRWPASVRLEHHSSSFVMPTME

SEQ ID NO: 7843 - protein, 66 aa, Xenorhabdus sp.
QNDWHQADIIAALRKRGTTLAAVSREAGLGSSTLANAFSRPWPKGEWIIANYLGIHPSEIWPSRYF

SEQ ID NO: 7844 - protein, 44 aa, Xenorhabdus sp.
MNLTFSHTISPSAKTGDILLQTVINNLNPQQRQMALDLLQTSAA

SEQ ID NO: 7845 - protein, 83 aa, Xenorhabdus sp.
MRISDLAGYLVHNRRHDGQAEYHIIPSVFEAEILQGLQKKSGFEALEEAGMLVKAEKDRFISKTISVNGTQGRFVVLIFRDED

SEQ ID NO: 7846 - protein, 52 aa, Xenorhabdus sp.
VKLVNWHEMAGLATWSAALSDFLAGLFRRLDTVHTEKSLCFSQWLRITRCPR

SEQ ID NO: 7847 - protein, 291 aa, Xenorhabdus sp.
MSRLIKELKFFARQSGGSHKTCHDRIRIAGRLGALLLSLNIQVKSLNNLKTKHVEQYVDARLSQGIAKRTVQNEMAALRNIFRMAGREKLETSPRLSNQALGLSGTSRAGTKQAIPDTTFQAVYQKALERDVGFAVTLKLARLLGLRSQEAVQCSASLKSWLKQLEQPEPKLHIVFGTKGGRPRQTRVLGIAAVKEAVEQAMAIAEQRGGRLIDKPDLRQAMNYWRTHTTKMGLTGRYSPHSLRYAWAQEALNFYQQKGFSRQEARALVSMDLGHGDGRGRYVERVYSRST

SEQ ID NO: 7848 - protein, 199 aa, Xenorhabdus sp.
SQELNFTLSLIDKITQPLAGAKAAVSGFAQSSQDAFGKLAIGGAGLAASFWSIKSFLDPAIEMDEALKSASLQGIDSSVMNKVAKDAMTFSSQYGKSSIEFVQSASEISKAVNGLSHSDLPQMTTIANTTAAALKSSASDTAGYMGKMFTQFASHANAVGHLQFAEELAGKAVMMSKTLVRRCQKSLTDGRGASSGNAF

SEQ ID NO: 7849 - protein, 89 aa, Xenorhabdus sp.
MSQENKVITLIIAEKEINFEPNIIAYNSMINDMTLDNKIVPIVTYLRRIVQPASKAALDELLQIPGAAMQIVERVNAEYAPKLDIEIKN

SEQ ID NO: 7850 - protein, 118 aa, Xenorhabdus sp.
VALAFGAGWRVNHYYRDSLELNITRAAANAKEAMRQELQAISRASARQLEDKLEGIANAAPREIRTEVVKPVFTAVCVSPEFVRLYNDTVDSIGRTLSGKPAEKMSDTITDINRHDRK

SEQ ID NO: 7851 - protein, 112 aa, Xenorhabdus sp.
MTLSEKQQLFAVKVAQLILWADERGYRVTFGEAYRTPEQAKRNAQQGTGIANSLHTQRLAVDLNLFIRGEYQTRSEVYLPLGEYWESLGGTWGGRFSRPDGNHFSFEHNGVK

SEQ ID NO: 7852 - protein, 151 aa, Xenorhabdus sp.
MPKLLHIREMPEIDAVRVYLQGGHYRNGPQQVPAGVVGYAQQNGMSVRISRRQVKKTVDRERMATIKQAKKLRDLGYQVRKGKRWRKPPVKEITANMKFIQAGTMIRILSGEEIKSQWEITIPARAFLGMNDDEFSKALARQLQGIGYGAG

SEQ ID NO: 7853 - protein, 86 aa, Xenorhabdus sp.
MIHGQLNRNQLKQLQDALSSLDLPEKKRQRLLWRIAKYALIDAAKRNVRNQRSPARGKLGCQKKSVAQENAQEYAEVITYPGNARN

SEQ ID NO: 7854 - protein, 138 aa, Xenorhabdus sp.
MDEIRFIPAQRDLGLGQYQMFIQQYEAVIAWGRFPYGECDPRNIPLLIDSWLTGQGDSVNEANVEQERPSLTVEVDGATAVVIVTLSLAEPVVIREDPNGMIPFDGKRWSLASTEVWFAEQGAVHSVDETGAHIGKRS

SEQ ID NO: 7855 - protein, 150 aa, Xenorhabdus sp.
MFNGNTVDYRDAPLTNDGFWPDLNLREFQVNRKLPADLDNDMLANALLATVAEINLDLANLKSRLQAKGYQSAAVVPGISMNGSNVLVSQYKRAVYARAKADLLGEYTSLVSRAPNPGQESPDVQKRLLAESAVTLRSMKGKSRTTVRLI

SEQ ID NO: 7856 - protein, 282 aa, Xenorhabdus sp.
SQLMTNWICIAMEGDTVDGRAIEPQWILEAAELYDPQLYTARIWPEHERWFGAMGEVLAVKAEHGEDGALRLYAQLRPNHRLLEANRDGQLLFTSVEFTLNGNFRGTGKTYLEGLAVTDSPASVGTTRLQFSKNKKPHRFGAYKPLVIDEVREFKQKGIKMAKGTKGNKKTWRSLFNIEEQEETPIENPTDDDPLQVIAETLAKMEDRLAALEAAQASTEQEVEEVQDDIETVKEVVDTEEFARLRDNLPNILKKFGKLDGIVTRLPSRNPKGDKNKNFNYL

SEQ ID NO: 7857 - protein, 106 aa, Xenorhabdus sp.
MRSKIEANDYKNYILGFIFHNFLSDKQIQFLIQNEFDEQSLKDLNEGDSDTLKYIQNELGHFIDYDNLFLTWISNGKDFDIAYVRDALPAFTLHQQCMNLLVEMQY

SEQ ID NO: 7858 - protein, 87 aa, Xenorhabdus sp.
MPNKAVIRLNDKTDHGGKVITAIDGYVYQGVPVAGKGDLVICPKCEDKFPIVEGSETLKYQGKQIALEGMSTACGAKLIASQKTFLA

SEQ ID NO: 7859 - protein, 240 aa, Xenorhabdus sp.
MLKKYSFNAYIDELVVHCNESYPYLDVNLGKNDLRSALENAVEAAKNEGFDQRGAVQFYIDMLILFGTGFQTDPQYAWIKTSLDNHAHLGQLEKTSLLYHEITRYLNEVHGEKDEHLKASIFKFQDINIERLNVQWNTYEININDILKYLFPQKYKYIKQDDIKKLIQLGVEKSNQYGIENANQSAFLTLSMFLLGHEFDQDIFLPHLNEKLFKQYYSDADALIMVMEKQTKEYLKVFIQ

SEQ ID NO: 7860 - protein, 465 aa, Xenorhabdus sp.
MDKNSIASVFSDLKNKASKGIEQQQKSKVTHPTSVPNCAGKVGDPGVKCNQKFSHQLKLLPIENQVNVSNVPYAFISIPARGFGKTNGKGETDRIMTRQPEEVTVLVGKLAKSYERRRGSFGSLKELEERKISLLTNTGEPTTEKPYISGYDYITVVGARTAPWEVSLGSTKRTVQFESFFKESPGNQYRFINSGLHQLQLFPKSSQDHAVQRIMVVFQQGYTQKDIDRINDYTNKLGGRIIYVKNKQGLIDFLNQRKEKKRLIKEMVIFSHGIINYATFHYQGEDVEEGLFGSDEIKKVYESIFDFDAKITTYACRAGISVDNGYPGDFTGIPDAGQDKSPAQQMANTWDVEVKAFEKRSTYVGVYGAEEEKKYNSIIDKYEADNRAYKYELAKGNKNTKPPEKPNNYDMMKKRVEGVKTREYNEDHGGGPIEPNGSWRLPGTGNTPEGLKNDLQDYKPIEWTL

SEQ ID NO: 7861 - protein, 163 aa, Xenorhabdus sp.
MTATLKEKWEKYRETYPEMKLYALVDGLQYERCFDDKLTYLEGANNPLFRQFPDAEIAFAGPWLFDMNQSQAWEEKFLRLENAAPAVSWLYSTRSLDKLTRHLESQLNIRLKTGKTALLRFYDPRVLHQIPHIFTLEQLIEFTKDIEEWSYQLDNNHHVVKGK

SEQ ID NO: 7862 - protein, 667 aa, Xenorhabdus sp.
SGLRFFCQIGSLPENTFAVADFTLREGLSDLFTLNLTLVQSLPDNPFKPKTEIDLTALLMQEAVLQVFHGETEQRKITGIISHADWCGTDGNKTRYTFTVRPSLWRLTLNQDSHIYHRQRVPDIMDLLLKKHHVQADSQLEDPHQSREYTTQKRESDYAFFCRLAAEEGISFWFEDETLFFSDSHLGMTANLPLQYQPQPDTAHGQDVIYQVRLGVGMAPKRSIHRDYNPDRPLSQVYQLESSPEYQAMGTLTPYTIYESYGRFQQEAEGKPFVKYRHEMLKNQTQSGSGNSNCIKLMPGKIFEIENHPHAPLNTRWQIVGISHHGRCPQALGDNGGEGTTLSNDFSFIDGYADWRPPFHYKPQADGDESATVVGPEGEEIFVNKDGAIKVHFHWNRYDKADDSASCWVRVAQGWNGNGFGFMAIPRIGQEVIVSYLNGDIDRPIVTGCVYNGLNRPPLDLPAQKTRTTFKTKTHKGEGFNELRFEDAEGSEEVFIHAQKDMNTHILNDETSNISHNRTHHIKNDAHLRIDNEYRVQANNDISLSTGQKLHIKAEDALLTQSGNEIHLSAGAKVVIDAGAELTIQAAGHFLKIDSGGITSSAVVNFGSGAPGNGSGWGGKLPDRLDKLSPINMAQVEKMVTPPPEKICLSCLMEAASTGSVMVMRGE

SEQ ID NO: 7863 - protein, 460 aa, Xenorhabdus sp.
VQGKQIQKTREYSDIVLTLHQTGNPVSGWSGGKLSFFMGTDTNRAAQLSLWLDMHIDEIYWRTAEGETRLRHSDFLGWSENLQHPLLPTDDLPVSRLQQMTEYYCLPHAFSFMTLNINESRELPLNPDGTGELVIRLFGELPIEALGDAFQLGCVPAVHLVPMVTQSISLLPGASCYPQPLAETERLFRVDSIQTAKQPGEKVTQSSAPRGKPCHFVPIDQFHAKSDWLLEAGEPGNVYFQALITDDLLGRLHNRLHFYGMDGNAADNLALQTVCAHVIGYHEQAMQLIVGDITLTQGSVPAHLHARNITPVSPDFPPMVMGKSDWSLINLLNCPPFLLFHADALKDFLRLYDCYAGHDRILSRRMQQHINGIIRVDAQSGERLDFTRQGLPVNGNTLHISLDTACYENDGVMYQFCRMIDHLLTCFVVRNNFIMLKIYRQGEQAVLWEFRQRIGLRSEM

SEQ ID NO: 7864 - protein, 121 aa, Xenorhabdus sp.
VKNQKESLYQQELTYLREKMKLAAAENPQLAEFLEHPNDPDIQRLLEGFALLSSNLRSTVEDSIPQITHEMLGRIWPHTLRPVPPTTIIQFTPHQGVHQGIADIPQNSPVTAVVGEQHFPF

SEQ ID NO: 7865 - protein, 221 aa, Xenorhabdus sp.
VKKHIAKLQQGKTLFEQGQQATRLAQQTTGSFVGHEPGLAKKAAGGHSAATKALQKASQFLSDGAPSGLQFTLTAGGLAPETFVVTDFTLNEHFSQPFQLEVGLASADPAIDFPAVLDRAATLTITLDGVESRSITGIVASFEQGNTGLHQTTYQMSIRPDLWRTTLRQNSRIFQQLNIAAIITNILKEHGIRDMVFSLRHAHPEREFCVQYQESEINIIN

SEQ ID NO: 7866 - protein, 427 aa, Xenorhabdus sp.
MSKTHLTEKKFSDFALHPKVIETLDKKGFSNCTPIQALTLPFTVEGQDVAGQAQTGTGKTLAFLTSTFHYLLSHPAAADHKTNQPRALIMAPTRELAVQIYSDAEELAEATGLKMGLAYGGDGYDKQLKVLEAGVDIIIGTTGRLIDYAKQGYINLSAIQVVVLDEADRMYDLGFIKDIRWLFRRIPSATQRMTLLFSATLSYRVRELAFEQMNNPEYVEVEPLQKTGHRIKEELFYPSNEEKMSLLQTLLEEEWPDRCIIFANTKHRCEDIWAHLAADGHRVGLLTGDVAQKKRLRILEEFSLGNVDILVATDVAARGLHIPSVTHVFNYDLPDDCEDYVHRIGRTGRAGESGHSISLACEEYALNLPAIEEYIQHQIPVSKYNSDALLKDLPVPRRRNRSRSGGHPRRTNMPRRGNTVRNRKRNP

SEQ ID NO: 7867 - protein, 502 aa, Xenorhabdus sp.
MLSSSSLYAAIDLGSNSFHMLVVRRVSDSIQVVARIKRKVRLAAGLDKNNHLSQQAMERGWQCLRLFAEYLQDIPAPQIRVVATATLRLAENSGEFVGKASEILGSPVKVIRGEEEARLIYQGVAHTTGGPEERLVVDIGGGSTELVTGTGANATQLFSLEMGCVTWLERYFNDRSLTEENFAKAEAAAHQILAPVTTTLLKQGWQICVGASGTVQALQEIMIAQGMDELITLPKLQQLKSKAIECGKLEELEINGLTLERALVFPSGLAILIAIFQALEIESMILAGGALREGLVYGMLELPVEQDVRARTLQNIQQRFQIDAEQALRVRQLAEYFFQQVAKTWELDERCRELLVSACLLHEIGLCIDFRQGPAHSAYLISHLDLPGYTPAQKRLLATLLQNQSGAIDLASLNQQNALPAQLALRLCRLLRLAIIFASRRQDDSLSALRLQAENETLTITLPYQWQAQHPLRAETLHQESTWQHYVHWPLFIEEQNNTHLG

SEQ ID NO: 7868 - protein, 281 aa, Xenorhabdus sp.
MSDNGTGLLGHEAPVGSGSYEIAKLSAGLTCAAVEAVLHGELDNAYSLSRPPGHHCLPDQAMGFCYLANIPLAIERAKKQFGLGRVAVVDWDVHHGNGTQHIFWERDDVLTISLHQDGCYPEGYSGEDDIGTGKGEGFNINIPLVAGAGHNSYMYAMDQIVLPALYRYQPELIIVASGYDANAMDPLARMQLHSDSFREMTRKIQQAADELCDGKLVVIHEGGYSELYVPFCGLAVLEELSGVRTEVQDPLLEMVQRQQPREHFDTFQRQEIDALKLRFHL

SEQ ID NO: 7869 - protein, 205 aa, Xenorhabdus sp.
VTAAYSHLPQVLDKFRAEHPLVEIKLTTGDAADAVDKVQSEEADLGIAGKPEKLPDNVSFTKIGEIPLVLIAPALPCTVRSLATQEYPDWNEIPFILPEHGPSRKRIELWFRRHKINHPQIYATVSGHEAIVSMVALGCGIALIPAVVVENSPEPVRSRISLLENISLVEPFELGVCALGKRLNEPLIKAFWRLLSSDSYSSSIG

SEQ ID NO: 7870 - protein, 508 aa, Xenorhabdus sp.
MTLAIIYTRATIGVDSPLVTIEAHISNGLPGLTLVGLPETTVKEARDRVRSALINSGFTYPAKRITVNLAPADLPKEGGRYDLPIAIAILAASEQIPSTELNHYEFLGELALSGEIRRVMGAIPAALSARNSGRQLILSTENQAELAILSQNETLLANQLLQVCHFLRGEKNILFSPAPITPQTEPLVLDLQDIIGQEQAKRALEITAAGGHNLLLLGPPGTGKTMLASRLCDLLPPLTHQEALHVAAINSLAGQSINPQKWHIRPFRAPHHSSSMAALVGGGSIPKPGEISLAHNGVLFLDELPEFNRTVLDALREPLESGEIVISRAKAKVCFPARVQLIAAMNPSPTGYHQGLHNRSSPQQVLRYLAKLSGPFLDRFDLSIDVPLLPPGILSKSSTKNGESSHEVKKRVENARNIQIERNGYVNAHLTRKQTEKVCRLKMEDAIFLENTLLKLGLSVRAWHRILKVSRTIADLKEQKKIEKPDIMEALSYRSMDRLLIQLQNQVG

SEQ ID NO: 7871 - protein, 280 aa, Xenorhabdus sp.
MHVDTELLKTFLEVSKTRHFGRAAESLYLTQSAVSFRIRQLENQLGANLFTRHRNNIRLTAAGERLVPYAESLMNTWQLAKKEISYVSQHTELSIGATASLWEAYLTPWLNMFYCDNQGIRIESRVSTRQSLVKQLHSRELDLLITTEPPKMDEFQSQLIGSIQLVLLTTQNNIEQGIENYIKLEWGADFHQQEQLILKSDHPPIITTTSAHIARELLESVNAATFLPVHWLEEYSKLVVAPDNEQIKRPLYAVWLQNSDQHTLIQQLLKIPVEKAPVTN

SEQ ID NO: 7872 - protein, 466 aa, Xenorhabdus sp.
MSDSKQDLPEQGLQRGLEARHIELIALGGTIGVGLFMGSASTLKWAGPSVLLAYIIAGLFVFFIMRSMGEMLFLEPVTGSFAAFGHKYLSPYWGCLTAWGYWFMWVSVGISEITAVGVYAEFWFPDLPQWVAALVAVSLVALANLAAVRLYGELEFWFAMIKVTTIIVMILVGIGLIFFGLGNDWQAIGLDNLTTHGGFFAGGWKGFLFALCIVVASYQGVELVGITAGEAKNPQVTLKKAINNILWRILIFYVGAIFIVVTLFPWTEIGSHGSPFVMTFAKVGIASAAAVINFVVLTAALSGCNSGMYSGGRMLYALAENRQLPASLRKLSKNGVPVRCVAITIGCLIAGSSLNYLIPNPQSVFVYVYSASVLPGMVPWFVILVSQLRFRQHHQEALKQHPFKSILFPYINYLTLIFLSCVLIGMAINPDTRFSLMVGGAFLLIVSLIYWVIKFIREQKQVENVG

SEQ ID NO: 7873 - protein, 245 aa, Xenorhabdus sp.
MALNDIRKYRIRGLELWGFQGMSHFLDHLFQDGQVKTGTLMAINAEKVLTAEKDKALSTLLDEAEYLYADGISIVRAIRRKYPDAQVSRIAGADLWEALMERAGREGTPVFLVGGKPEILTQTVNKLRKQWNVNIVGSQDGYFTADERNAVFERIRASGAKIVTVAMGSPRQEIFMRDCRKVHSGSLYMGVGGTYDVFTGHVKRAPKVWQNLGLEWLYRLLSQPSRIRRQIKLLRFLGYYYSGKL

SEQ ID NO: 7874 - protein, 277 aa, Xenorhabdus sp.
VGTVGFGILTYVIVGGTRANIIIAFALFLFIGIVRGWITLWMLLMAGVIGIVGMFWLALKRYSLDVSGAEAFYTFLYLTRDTFSPWENLALLLDNYSKIDFQGLAPIIRDFYVFIPGWVWPDRPNLVWNTANYFTWDVLNNHSGLAISPTLIGSLVVMGGVFFIPLGAVVVGLIIKWFDWIYEAGKQEANRYKAAILQAFCFGAIFNMIVLAREGMDSFVSRVVFFGVVFGLCLIVAKLLYWLFDSAGLVRKFVITNMSVSPETPARVDVRSKNGAE

SEQ ID NO: 7875 - protein, 325 aa, Xenorhabdus sp.
VAKDASWQDPLWITENYPALTITTYENKAVLSQAVIVMAQEDRAKRFFFHGQFNAGLWLALLAGKIKSHQFWWHVWGADLYEDSRQLKFRVFYLLRRLAQKRVGRVFATRGDLNYFSKSHPRVPASLLYFPTRMTPSLTVKDKLFSPEGITILLGNSGDQSNRHIEALHKIHRQFGLEARLILPMGYPDNNQAYIQNVEQAALSLFRAENIRILKEKMTFDDYLSLLRQCDLGYFIFQRQQGIGTLCLLIQQGVPFVLSRQNPFWQDLAEQQIPVLFDGDELYKHWVQEAQRQMLSLDKKAIAFFDPNFVKGWKIALLEASGELQ

SEQ ID NO: 7876 - protein, 416 aa, Xenorhabdus sp.
MSLAKASVWTAGSTLIKIGVGLLVVKLLAVSFGPAGVGQAGNFRQLITVLGVLSGAGIFNGVTKYVAEHHSEPEKLKAILGTSSSIILGFSTLLAVVFLLFSDAISISLFGHNHYKTVVQALAFIQMGIAYANYFLAILKGFRDAQGNALAIILGSLTGVMAYGLCYWLGAYEGALAGLALVPALVVLPAGMMLLQRKTIVLSALKPAWDRVIASHLGKFTLMALLTSITLPVAYIMMRNLMAERYSWEEVGIWQGVSSISDAYLQFITASFTVYLLPTLSRLESKNKITSEIVKALKFVLPAVAVASFSVWLLRDFVIWLLFSDKFTAMRDLFAWQLVGDVLKVCAYVFGYLVIAKAALRFYILAEVSQFLLLTGFSHWLIPINGALGAAQSYMATYVVYFSLCCSVFIIYCRRA

SEQ ID NO: 7877 - protein, 403 aa, Xenorhabdus sp.
VQQLKALHIGYTEDEMIPFNKPPVVGTELEYMQQAMASGKLCGDGGFTKRCEEWMEKRFSCPDALQKTDAFHKTKVLLTPSCTASLEMAAILLNIQPGDEVIMPSYTFVSTSNAFVLRGATIVFVDINPDTMNIDETKIEAAITDKTRAIVPVHYAGVACEMDTIMALAEKYNLYVVEDAAQGVMSTYKGRALGTIGHIGCFSFHETKNYSAGGEGGATLINDQSMLARAEVIREKGTNRAQFFRGQVDKYTWRDIGSSYLLSDLQAAFLWAQLEVADKINHRRLTLWNNYYQALKPLADKGLLTLPVVPENLEHNAHMFYIKLKDVAERSEFNRFMKEADILTVFHYVALHTSPAGEKCGRFHGEDRFTTRESERLVRLPVFYNITDEEQQIVISRIKEFFA

SEQ ID NO: 7878 - protein, 258 aa, Xenorhabdus sp.
LMEPLVIKLGGVLLDSDEALVRLFSTLQLYRKTHKRPLVIVHGGGCLVDELMQKLQLPIIKKQGLRVTPADQIDIITGTLAGTANKTLLSWAIKYRLPAVGLCLGDGCVVKVSPFNEEFGHTGMASPGNPDLLKILLDIGYIPIISSIGITEDGKLMNVNADQAATAVAQSLNADLVFLSDVSGILNGKGNKIPEVSEKEIQQMIEQGVITDGMVVKVHAALEAAKTLGRPVDIASWRYADQLIALFNGISVGTRILA

SEQ ID NO: 7879 - protein, 334 aa, Xenorhabdus sp.
MLNTLIVGASGYTGAELAACLQRHPYIHLAGLMVSAQSSDAGKCLSELYPQYKGTLDLPLQPLTDVAEAASGIDIVFLATAHEVSHDIAPEFLQAGCIVFDLSGAYRVQNTLFYSEYYGFEHKNIDWLEQAVYGLAEWQAEKIKTAQLIAVPGCYPTVSQLSLKPLLEAGLLDTGQWPVINAVSGVSGAGRKASINNNFCEVSLQPYGVFNHRHQPEIATHLGIDVIFTPHLGNFARGILATITCKLKAGITEEQVRHAYQQAYHDKPLIRLYENGVPALKGVVGLPFCDIGFAVQGQHLIIVGAEDNLLKGAAAQAVQCMNIRFGFEETQALL

SEQ ID NO: 7880 - protein, 145 aa, Xenorhabdus sp.
MITSGDKPETVYAVKLIFRNDIIVDKETCTQIMVWRTFSPEHQDAASGFPRRFFRFLLDNYRIIVTDEEQTGDGKRFWQIMIAWSMSVGYHVYISDGGEIDRPLTAVTSMDELLDKWDAFCWGRDKDLHRHRLIVISKEVLSSPN

SEQ ID NO: 7881 - protein, 878 aa, Xenorhabdus sp.
MNQQYSAMRSNVSMLGKILGNTIKEAQGKDILDKVETIRKLSKSSRAGNDADRQQLLSTLQNLSNDELLPVARAFNQFLNLANAAEQYHSISPHGEAASNPVALAALFERLKSKNFNNDDLVQAVNELSIELVLTAHPTEIARRTLIHKLVEVNTCLAQLDHDDLADYEHNNIMRRLRQLIAQSWHTDEIRKIRPTPIDEAKWGFAVVENSLWEGVPAFLREFNEQLEESIGYSLPVESVPIRFTSWMGGDRDGNPNVTAEVTRHVLLLSRWKAADLFLKDIQVLVSELSMSECTPELRQLAGGDEIIEPYREIAKQLRTQLNNTLAYLEKRLKGEQVIPPADLLLHNDQLWQPLYACYQSLKACGMEIIADGQLLDILRRIRCFGLSLVRIDIRQESTRHTDAIAELTRYLEMGDYASWSETEKQAFLLRELNSKRPLIPRHWQPSAETQEVLETCKVIAESPPDAIAAYVISMAKVPSDVLAVKLLLKAADCSLSLPVAPLFETLDDLNNAESVIQQLLHIEWYRELIQDKQMVMIGYSDSAKDAGVMAASWAQYRAQDALIRVCEKEGVKLTLFHGRGGTIGRGGAPAHSALLSQPPGSLKGGLRVTEQGEMIRFKFGLPQVTISSLAMYASAILEANLLPPPEPKPEWKQIMDTLSDISCDMYRDYVREQPEFVPYFRSATPEQELAKLPLGSRPAKRRPTGGVESLRAIPWIFAWTQNRLMLPAWLGAGAALQHVIEAGQQDTLSEMSRDWPFFTTRIAMLEMVFAKADLWLAEYYDQRLVDKKLWPLGTKLRNQLLADIETVLAVSRDGQLMADLPWIAESIALRNVYTDPLNVLQAELLQRSRQQEQPDPRVELALMVTIAGVAAGMRNTG

SEQ ID NO: 7882 - protein, 811 aa, Xenorhabdus sp.
MVELAIAGAESGRQLHKFGGSSLADVKCYKRVADIMANYSQPGDLMVVSAAGSTTNQLIDWLKLSQNDRISAHQVQQALRRYQQELIRGLLPEAVAETLIADFVADLERLSALLDKPVSDITYAEVVGHGEIWSARLMAAVLESQGISSAWLDARQFLRAERAAQPQVDVILSQPLLSQLLVENSDKRLVVTGFISSNNKGETVLLGRNGSDYSATQVGALAGAKKVTIWSDVAGVYSADPRKVSDACLLPLLRLDEASELARLAAPVLHTRTLQPVSLSDIDLQLRCSYQPEQGSTRIERVLASGMGAKIVTSHDDVCLIELHLFSALDFKQTYKDIDSLLKRAQIRPLATGLHTDCNLIQLCYTSEIVNSALEVLQDASLPGKLSLREGFSLVALVGAGVCKNPLHSHRFYQQLKDQPVEFIWHAEDDISLVAVLRLGQTSHLIQGLHQSLFRAEKQIGLVLFGKGNIGSRWLELFAREQKNISARSDFEFILAGIVDSRRSLLNYQGIDASRALAFFNDEATTHADDELFLWMRAHPYDDLVVLDVTASEELAGNYIDFASYGFHVISANKAAGASDSNTYRMIRDAFTKTGRHWLYNATVGAGLPINYSVRDLRESGDTILSISGIFSGTLSWLFLQFDGTVPFSDLVEQAWQQGLTEPDPRIDLSGQDVMRKLVILAREAGYEIEPDQVRIESLVPPEASVGSIDEFFENSSAINEQMQKRLEAAREMGMVLRYVARFDAKGKAKVGVEAVRSEHPLASLLPGDNVFAIESRWYRDNPLVIRGPGAGRDVTAGAIQSDLNRLSQLL

SEQ ID NO: 7883 - protein, 383 aa, Xenorhabdus sp.
KQATAAVQSGINVDEQYGCVVPPVYLSSTYNFTGFNEPRAHDYSRRGNPGRDVVQQVLAELEGGAGAVMTSSGMSAIHLLCTVFLQPGDLLVAPHDCYGGSYRLFDSLSRRGAYNVIFVDQSDGAALRQALAQKPKLVLIETPSNPLLRIVDIRYICELAREAGALTVVDNTFLSPVLQKPLDLGADLVVHSCTKYLNGHSDLIAGAVVAKDPAIAEDLAWWANNIGVTGGAFDSYLLLRGIRTLSARVLLQQNNAAAIAEYLQQQPQVKKLYYPGLKDHPGHEIALRQQAGFGAMLSFELAGDEQTMRGFLSALKLFTLAESLGGVESLISHTATMTHAGMSAEARKQAGITDSLLRISVGIEDSQDLIADLDSAFQAAATR

SEQ ID NO: 7884 - protein, 80 aa, Xenorhabdus sp.
MSFEVFEKLESKVQQAIDTITLLQMEIEELKEQNAVLSQDVQNATDSRDSLVRENEQLKQEQSAWQERLRTLLGKMEDVQ

SEQ ID NO: 7885 - protein, 329 aa, Xenorhabdus sp.
VLLLVILIGGNAWAKDLQLLNVSYDPTRELYQQYNQAFSQYWQQKTGDRVTIRQSHGGSGKQATSVINGLQADVVTLALAYDVDAIAERGRIAKNWLHRLPDNSAPYTSTIVFLVRKGNPKHIKDWSDLIRPDVSIVTPNPKTSGGARWNYLAAWGYALAHNNQDQSKAKAFVKALYKNVEVLDSGARGATNTFVERGIGDVLIAWENEALLAIHTLDNGEQGKGQFEIVTPGMSILAEPTVAVVDKVVDKRGTRELATEYLKYLYSPVGQEIAAKNYYRPRDKTIIEKYRAVFPELKLFTVDGVFGGWEKAQKEHFATGGVFDEIIRR

SEQ ID NO: 7886 - protein, 321 aa, Xenorhabdus sp.
IKRIGVLTSGGDAPGMNAAIRGVVRAALTEGLEVYGIYDGYLGLYENRMKKLDRYSVSDMINRGGTFLGSARFPEFRDDKVREIAIENMRKNEIDALVVIGGDGSYLGAKKLTEAGFPCIGLPGTIDNDVAGTDYTIGYFTALDTVVEAIDRLRDTSTSHKRISIVEVMGRYCGDLTLSAAIAGGCEFIVLPEREIPFDREELLAEIQAGIQKGKRHAIVAITEHVCDVDELAKYIEAETRHETRATVLGHIQRGGAPVAYDRILASRMGAYSVQLLLEGCGGRCVGIQNEKLVHHDIIDAVQNMQRIFKKDWLETAKKLY

SEQ ID NO: 7887 - protein, 301 aa, Xenorhabdus sp.
VNMGMNYGRWVSTAALVATILASVLLVVKILAWWFTGSVSLLAALVDSLVDLAASLTNFFVVRYSLQPADEEHTFGHGKAESLAALAQSMFVSGSAIFLFLTGFQHLFSPQPLEHAAVGVWVIIIAIVSTSCLVIFQKWVINKTQSQAIRADMLHYKSDLLMNGAILVALVLSVYGFRRADALFALGIGVYILYSALRMGYDAIQSLLDRALPDEERQEIIEIIRNYPGVSGGHDLRTRQSGPTRFIQFHLEIDDNLPLVQAHALAEGIENKLRDRFPGADIIIHQDPCSVVPDERKNNWD

SEQ ID NO: 7888 - protein, 241 aa, Xenorhabdus sp.
FLLLSFFALREFITLTPTRRSDHEALFWCFFGFLPVQYVLVGMQWYGLFSVFIPVYVFLFLPARIALVGDTTHFLERTAKIQWGMLVTVFAISHAPALLMLDIAEYQGQNIKLLLFLMIVAQMSDVLQYVFGKLFGKRPIVPKLSPNKTVEGFIGGILASVLLGISLYWITPFSPWVAGGMSLAITLMGFIGGLCMSAIKRDSGVKDFGEIIEGHGGMLDRIDSLCFSAPIFFHLTRYFYT

SEQ ID NO: 7889 - protein, 252 aa, Xenorhabdus sp.
MSMDDTQPLISHLIELRKRILNSLITVLVVFLALVYFSNDIYRLIAAPLMDQLPVGANMIATDVASPFFTPIKLTIMVSVFVSAPMILYQVWAFIAPALYKHERRLIVPLLFSSSVLFYLGMVFAYFVVFPLVFGFFTKTVPTGVMIATDISNYLSFVMALFMAFGVSFEVPIAIILLCWSGVVTPESLKRKRPYILVGAFVVGMLLTPPDVFSQTLLAVPMYLLFELGVFLSQFYVGKRTLHETENGSERE

SEQ ID NO: 7890 - protein, 299 aa, Xenorhabdus sp.
MVLMNPKGAIGVEQKTLILTAFGLMLIVVIPAIVMAIVFALRYREANKSATYRPNWAHSNKIELVVWTVPILIIIVLATITWKTTHELDPYKPLDSDVKPVTIEVISLDWKWLFIYPEQGIATVNEIVFPKDVPINFKITSDSVMNSFFIPQLGGQIYAMAGMQTKLHLIANSAGKYDGFSASYSGHGFSGMKFTATATEDRAGFEEWVQKVKASPKTLDTVQAFNALAKPSQNNPVEYFSSVKPQLFQETIAKFMGDMGHGGMFGMSHGKTGHDKAEHGEAAGHNMNMSQPAHAGVEE

SEQ ID NO: 7891 - protein, 668 aa, Xenorhabdus sp.
MQVLRNKDMWGKLTLDAIPLHEPIIVVTLLGILLGGLAVVGSITYFGKWKWLWSEWLTSVDHKKIGVMYIVVAMVMMLRGFADAIMMRGQQALASAGEAGFLPPHHYDQIFTAHGVIMIFFMAMPFVVGLMNIVVPLQIGARDVAFPFLNSLSFWLFVVGVVLINLSLGVGEFAQTGWLAYPPLSGLEYNPGVGVDYWIWSLQLSGVGTLLTGVNFFVTILRMRAPGMSMMKLPVFTWASLCTNVLIIAAFPILTVTIALLTLDRYLGTHFFTNDMGGNMMMYINLIWAWGHPEVYILVLPVFGIFSEVTATFSKKRLFGYTSLVWATIVITILSFIVWLHHFFTMGSGANVNAFFGIATMIISIPTGVKIFNWLFTMYRGRIEFKTPMLWTVGFLVTFSIGGMTGVLLAVPGANFVLHNSLFLIAHFHNVIIGGVVFGCFAGTTYWFPKAFGFTLNEKWGVRAFWFWITGFFVAFMPLYALGFMGMTRRLSQDINPEFHPLLVVAAGGVVLIALGILCQVIQFYVSIRDREQNRDLTGDPWGARTLEWSTSSPPPFYNFAEVPHIQTRDAWWDMKEKGTEYKRPAKYEEIHMPKNTGAGVVISAFCLVLGFAFIWHIWWMAIASFAGIVISCIVKSFDEDVDYYVPVAEVEKIEDQRYEELRKAGAK

SEQ ID NO: 7892 - protein, 203 aa, Xenorhabdus sp.
MSTQTLNNTAAHDAHGHHDTGANKVFGFWIYLMSDLVLFASLFATYVVLANGTAGGPSGKEIFELPFVLVETFLLLFSSITYGFAMLGMNKGKAGQVNLWLFVTFLLGLGFVSMEVYEFHKLISEGFGPDRSAFLSSFFALVATHGLHVTFGLIWIIVLMVQVARRGLTDVNQTRLNCLSLFWHFLDVVWICVFTVVYLMGAM

SEQ ID NO: 7893 - protein, 294 aa, Xenorhabdus sp.
MIKQYLQVTKPGIIFGNLISVIGGFLLASKGVIDYPLFFATMVGVSLVVASGCVFNNYIDRDIDRIMERTKERVLVKGLINPKISLIYASVLGIAGMVLLYVAANALAMQLALIGFVIYVGVYSLYMKRKSIYGTLVGSLSGAAPPVIGYCAVTGQFDMGALILLLIFSLWQMPHSYAIAIFRFKDYQAANIPVLPVIKGISVAKNHITLYILAFMVATLMLTISGYTGYKYLIVAAVVSIWWLGMALSGYKTTNDRAWARKLFIFSIVAIMSLSIMMSVDSAASPEIALTYIR

SEQ ID NO: 7894 - protein, 455 aa, Xenorhabdus sp.
MNDNKMTPLELRATWGLGSVFSLRMLGMFMVLPVLTTYGLELRGASEALIGIAIGIYGLTQAIFQIPFGLLSDKIGRKPLIIIGLLIFVLGSIIAAFSDSIWGVIVGRALQGTGAISAAIMALLSDLTREQNRTKAMAFIGISFGITFAFAIVVGPIVTHQIGLNGLFGTIAILASCGILITLFAVPSTHKHLLNRESGIVRGSFRLVLSDPQLLKLNFGILSLHTLLMSSFVALPLVMEKVGFPPQQHWKVYLITTLISFVAVLPFIIYAETKRRMKQVFLLCIGMLFIAEFVLWSLGSHLWGIFAGIQIFFLAFNIMEAILPSLISKEAPAGYKGTAMGIYSTSQFIGVALGGSLGGMLYEIQGASLVFMAGIILILFWFILSLTMRQPPYVSSIRLVLPAQLSDPEALEKEIQSQVGVKDVVIVPEELSAYIKVDTKQTNREQLEQIVIAHS

SEQ ID NO: 7895 - protein, 90 aa, Xenorhabdus sp.
VMKHDGIQISQQALIDYIMDVITQTSENSSSMRQDIRSQRRTEIDYITGFLLTRARVHGLILTENAQIYRYIKRQEEEYERLSSHLSRSR

SEQ ID NO: 7896 - protein, 198 aa, Xenorhabdus sp.
MNASALICLAHGSEETEAVTTIDLLVRAGINVTVASTATDGALILTCSRGVKIVADVPLVEVVDEDFDAIILPGGIKGAECFRDSGLVVEKIRTAQSQEKIIAAICASPAIVLEHHQLFPVGNMTGYPSMKDKIAPEKWIDRRVYFDERVNLLTSQGPATAFDFALKLIELLKGKDTAAEVAAQLVLPPGINNYQNLQ

SEQ ID NO: 7897 - protein, 85 aa, Xenorhabdus sp.
MSKANRTSATEQAPTFETSLKELEEIVIRLESGELPLEDALNEFERGIQLARQGQKTLQQAEQRVQILLSNDAQSPLDEFSPDAE

SEQ ID NO: 7898 - protein, 310 aa, Xenorhabdus sp.
MLSNFMSEQCKAPFEEQLSNCQQHINEKLMATFSSLPFLGSPLATAMQHGAVLGGKRLRPFLVYAVGKMLGLPKESLDAPALAIECIHAYSLIHDDLPAMDNDDLRRGQPTCHIKFGENHAILAGDALQSLAFEILAKHNMPNIALSDRLEMVAELAISSGIAGMCGGQSLDLQAEGKQIDLAALEKIHQHKTGALIRCAVRLGAYGAGARGREVLPLLDQYAQAIGLAFQVHDDILDVIGNTEIIGKRQGNDQQLGKSTYPALLGLEQAQKKAKDLHEDAIAALTELEKQFYNTVTLKQLAGFIIERNS

SEQ ID NO: 7899 - protein, 621 aa, Xenorhabdus sp.
MSIDIAKYPTLALAETPEELRLLPKDTLPKLCDELRQFLLNSVSRSSGHFASGLGTIELTVALHYVYKTPFDNLVWDVGHQAYPHKILTGRRDRINTIRQKNGLHPFPWRNESEYDTLCVGHSSTSISAGLGMAIAAKHEDKGRKTVCVIGDGAITAGMAFEAMNHAGDIDPDMLVILNDNEMSISENVGALNNHLAQLLSGKLYTTLRESGKKVFSGLPPIKELLKKTEEHLKGMVVPGTLFEELGFNYIGPVDGHDVLALTQTLKNMRELKGPQFLHIMTKKGRGYAPAEKDPISWHAVPKFDPSTGSLPKSSDTRPTFSKIFGEWLCEEAATDKKLMAITPAMREGSGMVRFSREYPEQYFDVAIAEQHAVTFAAGLAIGGYKPVVAIYSTFLQRAYDQLIHDVAIQNLPVLFAIDRGGIVGADGQTHQGAFDLSFLRCIPNMVIMAPSDENECRQMLHTGYQYQEGPVAVRYPRGAGTGAELQPLEILPIGKGVIRRQGEKIAILNFGTLLPNALQAAESLNATVVDMRFVKPLDKELVLEMASRHDLLVTLEENAIMGGAGSGVNELLMQTGNSVSVLNLGLPDYFIPQGTQAELHSDLGLDSAGILNAIEKRLNQ

SEQ ID NO: 7900 - protein, 249 aa, Xenorhabdus sp.
MLSDPVWDKLFVFMQQNRLTYHKKTHRLIMEGILFRMRTGIPWRELPAEYGKWNTVFKRFNVWSKKGVFNSLFNELAKNSDTEWLFIDGSIVRAHQHSSGAASKENEAIGKSRGGRSTKIHLAVDSYGLPVHFELSEGQTHDMVHAESLVAQSPPADFVVADKGYDSQALRTYIEEQGATAVIPYRKNSRNSDKKWDKDLYRYRHLVENAFARIKHFRAIATRYDKLARNYASTLALAFIIIWLPMWVE

SEQ ID NO: 7901 - protein, 152 aa, Xenorhabdus sp.
MQEVRNAVENAQRELTNRWDFRNVNASFELNEKNESVKIASESDFQVNQLIDILREKFAKRGIDGSVLNVPENMVHSGKTYSVEATMLQGIDTPLAKKIVKLIKDSQLKVQAQIQGEQVRVTGKARDDLQSVITLVRGAELGQPFQFTNFRD

SEQ ID NO: 7902 - protein, 482 aa, Xenorhabdus sp.
MKFIIKLFPEITIKSQSVRLRFIKILASNIRNVLKTFGEGTAVVRHWDNIEVRTKNDNLGAEICDALTRIPGIHHILQVEEREFRDLHHIFEQTYETYGHLLHGKTFCVRVKRRGKHSFTSNEAERYIGGGLNQHIESAKVKLTHPDVTVNLEINQDTLVLVKARHPGIGGFPIGTQEDVLSLISGGFDSGVSSYMLMRRGCRVHYCFFNLGGSAHEIGVKQVAHYLWNRFGSSHKVRFVAVDFEPVVAEILEKVDDGQMGVVLKRMMVRAASKIAERYGVQAIVTGEALGQVSSQTLTNLRLIDNASDTLILRPLISHDKEHIIKLAREIGTEDFARTMPEFCGVISKSPTVKAVKAKIEAEEDKFNFDILDHVVSEAQNLDIRQIAEQAGEQVVEVEMVTEFSSDDVLLDIRSPDEQDDRPLKMEGIDIHSLPFYKLSTQFGDLPKEKNYLLYCERGVMSRLQALYLREQGFQNVKVYRP

SEQ ID NO: 7903 - protein, 330 aa, Xenorhabdus sp.
FPGRRMRRVRRHDFSRRLVAENQLTVNDLIYPVFVMEGTNQRQEVPSMPGVYRLTTDLLLKEAEEIARLGIPVLSLFPVIESDKKSLDAKEAYNPDGLIQRSIRALKDAVPELGLLTDVALDPFTTHGQDGVIDQDGYVINDITKEILVKQALSHAEAGAEIVAPSDMMDGRIGAIREQLENDGYVNTQIMAYSAKYASCYYGPFRDAIGSSANLKGGNKMTYQMDPANSDEALQEIAQDLQEGADSVMVKPGMPYLDVIRRVKDTFGVPTFAYQVSGEYAMHMAAIQNGWLKEQPAIMESLLCFKRAGADGILTYFAKRAAQWLHEQKN

SEQ ID NO: 7904 - protein, 46 aa, Xenorhabdus sp.
MALNVRQTVTRKNNQPSDSRDYCYKLKGLSLVVLKTIVRNGKISPV

SEQ ID NO: 7905 - protein, 114 aa, Xenorhabdus sp.
VLGLIVLGPERLPVAVRTVAGWIRVLRSLATNVQNELAKELKLQELQDSLKKMEEKADLQSLSPELQASMDKLREAAESLKESYQLTPEEAKELEEDETHFHPPVSDKKSNSER

SEQ ID NO: 7906 - protein, 68 aa, Xenorhabdus sp.
VFGTNKLRTLGSDLGESIKGFKKAMSDDEKSDQAEKNSHDADFETKNLTDKPTVDQSEKSESKNKEKE

SEQ ID NO: 7907 - protein, 251 aa, Xenorhabdus sp.
MPDQSKETTHFGFRTVAKDEKKDMVAEVFHSVAAKYDLMNDLMSFGIHRIWKRFTIDASGVRRGHKVLDLAGGTGDLTAKFSRLVGEKGEVVLADINDSMLKVGREKLRDNGIVGNVSYVQANAEELPFPDNYFDCITISFGLRNVTDKDKALRSMFRVLKPGGRLLVLEFSKPILAPLSKIYDTYSFHILPRIGQAVVKDADSYRYLTESIRMHPDQETLKGMMETAGFDLVSYSNMTGGIVALHKGFKF

SEQ ID NO: 7908 - protein, 460 aa, Xenorhabdus sp.
MDIYWLYVLIGGLSGLLCGGIFVWFSVHQRIQYKEGELRELHGQLAVSNERLEQSHYWRTECEQLNQELLAQREINSIQEAELRELSTRLEESKLAAEEKQRLLINSEQRLNAQFENLANRIFEQNRRRTDEYSRQSLNDLLMPFREQLEGFRRQVQDSFGQEARERHTLAHEIRNLQQLNAQMAKEAINLTKALKGDNKIQGNWGEMILTRVLEASGLREGHEFHTQVNIKTDNSERFQPDIIVHLPQRKDVIIDAKMSLVAYERYFNSDDETEQVQALQEHINSIRGHIRGLGRKNYQQLPGLRSLDYVLMFIPVEAAYLVALNQAPEILDEALKHNIMLVSPSTLLVAVRTINNLWRYEYQSQNARLIADKASRMYDKMRLFVDDMQGLGQSLSKAQASYHLAMKKLAEGKGNLISQAEGFRDLGVDIKRPIDSQIIDIHNGFQDASRRQGNSSPGA

SEQ ID NO: 7909 - protein, 37 aa, Xenorhabdus sp.
MPQRHFQLANFASALIWAFGILAPGAFGIRWLAEWMG

SEQ ID NO: 7910 - protein, 262 aa, Xenorhabdus sp.
MTTTTTLISHPSLLPLNGGINFRDLGNRTLSNGSKIKSGLLFRSGSLDMLTDNDQTFLAEQNLFQIIDYRDSSEIIDRPDQVWSGASYHHAPANPLSKEVDANFDKLSHEALEQFDAKDFMLRLYQLLPINNPAYKTLASLLLQPEKGGIVQHCAVGKDRTGIGSALVLFALGADLDTVMEDYLVTNITLTPFREYLLNEYAKSMSDSLIEKMSYVFSVREEFLMTALNSINQHYGSVDIWLEKDVGLDMAARKKLQSYFLE

SEQ ID NO: 7911 - protein, 251 aa, Xenorhabdus sp.
MSDVFHLGIIKNDLQGATLAIVPGDPDRVEKIARLMDNPVHLASHREFTTWRAEIDGKPVVVCSTGIGGPSTSIAVEELAQLGVRTFLRIGTTGAIQENISVGDVLVTTAAVRLDGASLHFAPMEFPAVADFECTNALYAAAKASGTTTHVGVTASSDTFYPGQERYDTYSGRVVRRFQGSMKEWQEMGVMNFEMESATLLTMCASQGLRAGMVAGVIVNRTQQEIPDVELLKKTESNALSIVVDAARRLL

SEQ ID NO: 7912 - protein, 454 aa, Xenorhabdus sp.
IPVIGLGVAVFSLIFLVLRTRIHVLVAMLIAAVIAGISGGLSMGHVVDVIAKGFGTTLGNIGIVIGLGSMMGRILEASGATEQIAYSLIKWLGKRREEWALAITGYIVSIPIFINSAFIILFPLVKALAKKGKRNVLTLGVALAGGLVVTHHIVPPTPGPLGVAGIFGVSVGKVMLVGMILAIPCVIGITCYAKWLETKYPEYLLVEDEGNLQEIHQQYMEEKASKPLPGLFISLLPIVVPIVLIFTSVINGLLLKTALFAGKDDYLYFQVFNFLGSPIIALAISVLLAIYKLMPNVSKHEVIEHLETGLQTVGIILLVSGAGGALGAVLNEGSTGTIVAQYVASLPITPVLIPFIIATLIRIIQGSGTVAMITAASISAPVIKQIPDINMLVAAQAAMVGTLFFSYFNDCFFWVVNRMMGIKDVKKQIIIWSIPTTIAWGIGLCGILLLNFIM

SEQ ID NO: 7913 - protein, 279 aa, Xenorhabdus sp.
MILAVPCVIGITLYAKWLAIKYPEYQSINQNDEQKNLKQIHQNYMEEKANKPLPSLFISILPIIVPIVLILIKAINKLLLGTETFTGKESYLYFQCFDFLGSPIIALAVSVLIAVYMLIPNASKQEVIEHLEAGLQTAGIILLVTGAGGALGAVLRESGTGAILAEYIAGLPITPILIPFIISTLVRFIQGSGTVAMITAASISVPILSQMPDVNMLLAAQAATIGTLFFGYFNDSLFWMVNRMMGIKDAKQQMIVWSIPTTIAWGIGLCGILLLNLIM

SEQ ID NO: 7914 - protein, 113 aa, Xenorhabdus sp.
VIFLVLRTRIHVLLAMLIAAIIAGVTGGLTVIDTVEVISKGFGSTLGNIGIVIGLGIMMGRVLEVSGASEQIAYSFIKWLGNKREEWALAITGYIVSIPIFVDSAFVILLSIS

SEQ ID NO: 7915 - protein, 222 aa, Xenorhabdus sp.
MTVRRDIRILEEEGKVINIAGSIQLNDALRQELPWNEKVFIYHHHKKIIGKYAASLVEDGQVVYLDAGTTTFEIAQVLAERFNLTIVTNDFSISQYLMKKPQLNLFHTGGQVDKRNYSSVGNSAAMVLRTLNVDIAFISTSSWDIKHGISTPYEEKVLVKQAALDIARRKVLISDSSKYGKYGMFHVCPLSGLNDIVCDAKLPILVQNQLQELDLELHVVDV

SEQ ID NO: 7916 - protein, 249 aa, Xenorhabdus sp.
MFNDVPFTERFARAANAGFKGVEYLFPYEEPEEKLATLLKQYELTQVLFNMPAGDWESGERGIACLPGREQVFVDGVHKALAYALALDCKQVHAMAGKLDEQFTLEQQNECYIKNIQYAADVLAEYDINVLIEPINVRDMPGYFLTTQGQAEVLLKLINRKNVFIQLDLYHCQIMEGDLLRTIERLWGKFKHIQIASVPERSEPDNGEINFFWLFSKLDKMGYEGWIGCEYNPIGHTEEGLGWFIKAQL

SEQ ID NO: 7917 - protein, 420 aa, Xenorhabdus sp.
LGVIADDFTGATDIASFMVQNGWRVIQLLGGPDENPSIPYDVDAVVISLKTRSCSVDEAIDKSLKACWWLRNQLGCQQLFFKYCSTFDSTSEGNIGPVIDALMDELKTKISVICPALPINGRTVVYGHLFVNGQLLNESGMQYHPITPMKDANLLRLMEQQSKKSAGLINLNCVRQGKQAIRHQLNLLQQKGISYVIVDTMIMADLLSIAQAVSDMVLVTGGSGLGAALASYHTGKLLDDLMIGDIPPTEDKRTIVLSGSCSVMTNKQVIEYKKIAPAMEISVEQCINNSEYADILAKWAVQQSNVGWAPMLYATQPPEILSLIKQRYGTIESSTAIEKIFADLAKKLRQQGFNIFIVAGGETSAQVVQSLGVSQFSIGASITPGVPWVRSLHDDCWFALKSGNFGDTYFFQYAQNLCIE

SEQ ID NO: 7918 - protein, 295 aa, Xenorhabdus sp.
IGVIGLGAMGMGIAQSLIRAGISTYCFDINDKACEQLKQKGATGVANSPVKWASELDVLLFVVVNGTQIENILFGGENPLVKQLKADTCIVVHSTISAEQAQNFAIRLQEYHINMLDAPISGGALKAEQGKLTIMASGSPELFEQTKEILDVISERLYYVGNKIGQGSMVKMIHQLLAGVHIAVAAESMALAAKAGISLDLMYDIVTHAAGNSWMFENRIPHILAGDYSPKSSVDIFVKDLGIVLEAGKVMKFPLPMAATAHQMFLAASNEGFGQWDDSAVIKTFKGITLPEKKS

SEQ ID NO: 7919 - protein, 467 aa, Xenorhabdus sp.
MTKLINTQFNVLRQAWEQNRPDEKQRLEDLICLRKNFKASLNEMAEAISCDFGHRSRHESIMAEAVIVLNEIDLCLRSLKKWAKPQRYKAGWQLWPAKAEIRHVPLGVVGIMAPWNYPVNLTLIPLIAAIAAGNHVFIKPSEHTLHTNAYLEKLLSKIFPENRVSIAQGGADLAADFSALPFDHLLFTGSKANGKKVMAAAAQNLTPVTLELGGKSPALVAPDADLKKAAARIITGKLFNSGQTCIAPDYILLSENVIEPFIAEIKEQVSKRYPQPNNFPDYTSIINDNQYQRLIKLLEDAITRGHQTIPLMPLTDQEQALKQRVFAPTLVLNPDDSSAIMQEEIFGPLIPVKTYRSYDEAIHYIASHERPLAFYCFSRNNKYIEAALSHIVAGSICINDTLYQFACTGLPFGGVGPSGMGQYHGYEGFKTFSKAMPILRKYNPSLTDLLRPPYGQFINMVIRILTR

SEQ ID NO: 7920 - protein, 92 aa, Xenorhabdus sp.
MRVPVAIYATILAFMAGVAVNRAIVYPFKNPIPLAQHAANTAAIGGIFFAISDSLLAYGRFYFETPLSPFLVLSTYYIAQWCFSRSVIRRDQ

SEQ ID NO: 7921 - protein, 92 aa, Xenorhabdus sp.
GSSLTSGDANIEKIFVDNNVYLTSETQKATADHGEFDMAAQTFILTGKQVVLSEGTNVFTGCKLTVLMNTGQAKLESCGGPVRIMLDPKSQK

SEQ ID NO: 7922 - protein, 67 aa, Xenorhabdus sp.
PSAEAASPADKARYEGTLIAHGLTKTYNTRRVVNGVSLVVRRGEAVGLLGPNGAGKTTCFYMITLEH

SEQ ID NO: 7923 - protein, 35 aa, Xenorhabdus sp.
VIGGGLLGLGGQIDIIVDKDLFDIGVAAGERRTLA

SEQ ID NO: 7924 - protein, 148 aa, Xenorhabdus sp.
MANIIYLKMMGNKQGLISSGCSTIDSIGNKFQKGHEDEILVNELSSNLSMHQNVNFQPIDIRKPIDKSSPLLSQALTSNELLTCEFFFYRTSMSGGLELYYKIKLTEAALVNINFFCPNSITHNDAQPEESLSIKFKSITWEHVTAGT

SEQ ID NO: 7925 - protein, 91 aa, Xenorhabdus sp.
MMRLEWKPMALADREQIMEYIAQDNPQAAIALDDEFEASAERACLQPEMYKPGRVKGTREIVVRPHYILVYRVKRDILMVLRVLHAAQQWP

SEQ ID NO: 7926 - protein, 88 aa, Xenorhabdus sp.
MYRLSKQAAEDFAGIYDYTFWQFGEAQADQYTEALEEFFDTLARMPHMGREYDVVPDVMRIEFHKHTIFYKIRENDIFIVRILHQQMN

SEQ ID NO: 7927 - protein, 174 aa, Xenorhabdus sp.
SDHVSLRIGKGFTGVIHGTYRSTDGDHGRIEQRQLWLINDVNWLQKRHPQWHTLGGIAVVESWREEQGKTESYERRYYITSHRGASAEFLACAIRSHWHIENKLHWQLDVSFGEDSRRLRSGHAAENVALMNKIALNLLKNEKSVKIGVKTKRQKAGWDNGYMMKILTVGFSSV

SEQ ID NO: 7928 - protein, 75 aa, Xenorhabdus sp.
VISRTDEDNTAKEVTYYLRRYLTGQVLYRSVGFRVFIVLADKDWDILKTKMYMVTGRPHVMIKIIYKWPSIICNV

SEQ ID NO: 7929 - protein, 657 aa, Xenorhabdus sp.
MTYEKYVRDPRFQVILCSFLIPDTGERYWIPNHKGAVRKELNALMLHNCNVIAHNLPFDGFILSDYYGIEPHEFTCTMTMARPLHGAKAANSLAQLAKRYSLPNKKEEVHQVMGMRLEHFTATGLQRYGDYGLRDVDLLPPLYGLFRWHYSEMDMVTMSDTIRAGCVCQFDLDKALLCEYIPRLIQLQEEKLAKISAAFSQDVETFRKRLSSNPQFAEVLTQLGVDVPMKDSKTAKNADGTPKKTYAFAKMDMGFKALLTSGDPFLEAVCEARMGEKSTIGITRAKNLLDIAHRGKMPVPLKAFGATTGRWVGYQDINVQNFPKRGGDLTLRQSLRAPKGYSVVTCDLSQIEARRMADHAGQDDLLLQFARNEDPYSDFATMLYGYEVSKINGRKKERNVGKEGILSLQYGSWFESFYLRLRTAYDLDVTKEFCHDAVLLYRDRYKNIVQFWTQCQNALDVMLYGGTYSFGYENNYIAMKNKIILPDGWILRYDDLRIAGKDELNRDIILYTDAEKRETRKIYRGIIANNVTQGSSTRILQGMMMNLRNDGLFWCLTVHDELIFILPNEDLSYCCEQIQYRMRERPDWAQRTPIDCELTAGPTYGDQYDEAIWIPIANSLCMLNPIHRAFPPYQIPLNFKMISHVYITTVQIVMVCL

SEQ ID NO: 7930 - protein, 73 aa, Xenorhabdus sp.
VTDLPDGQVDINYNFGNDFIAPQCDADLEKLTDAQQFSILITQFITGWILDSENQKPADVQPVIRIPGAKRDG

SEQ ID NO: 7931 - protein, 181 aa, Xenorhabdus sp.
MDTVVKEKIGTGVADMLKKKFNSLVAEQRVGIPLFGEQEWAIKADGKVASWFDTSAVFMRGKTDLGMGSLKKLYLYDYKTGKDRYPKTDQLDLMSVMAKAQPTMQHYTQFDSALIFLEAGTVKTHTTSLHEEGHAIQMRKFLRESLRIIDSYERDYWPEQTSPLCAYCPVMNCPFNATVQK

SEQ ID NO: 7932 - protein, 98 aa, Xenorhabdus sp.
MTMKENPDVTFLTIRGDALLVLLRNLYERRKEEQAMLETILTMMESLDNSVQLAGEGMTNANARLVSILKQLKPKETAGLSDEEIMKLVGGQWNETHS

SEQ ID NO: 7933 - protein, 190 aa, Xenorhabdus sp.
MKHTLKAKDLQALMTYNPDTGGLFWKARTPELYRKYSQADQGMAERSCTWFNQRYAGEHVGITMNGSNTYVRIAIGSGAGNIRKNILDLIWAVVTGKEPNGLVRLLDDNCARTVDNIVCLSPHIAQLFRNPRAGIYRNREEKTFYWRIYRGKGLDQQGGYQTIKEAREARDNKLKELGLWQETLLNDVYS

SEQ ID NO: 7934 - protein, 312 aa, Xenorhabdus sp.
VRNAMYAWQMTGTPTPMGPKDAFGQICMFDGFGNTVPNIYWWENLTTWKVNEFKRLPLEGWQDTVAKYMKPAIRIRTRDCIDLPPIVYESRYLPLTSVQNAAIKMLRVQQTVNLAGEDITGDNQAILLNKVVQICCGAVLSENGEVVEMKPTKRLNECLEIIHSEEGKVLIFAPFRAAVDMIARYLRLKNIAVGVIHGGISKTARQKIFDSFQDDLKGQMQVIVGVPSAFAHGVTLTAASHTIWFAPYSSTEVYLQANARMERNGQTHHMTVTEIWGDQREKQLYDITAGRADAQLTLLDIYRSLLKDNQGD

SEQ ID NO: 7935 - protein, 139 aa, Xenorhabdus sp.
MSDPFVGISTAQLASAHIQLMQQKEAIEAMHKAAMIEETKSIDDQLRVLYYEVQKRMQNEKIHSLDTELGKVLLKTTVEYSVQDLDAWGDFIVTSQDLSFFSKNVSKPRVEAYRKQHGDALPPGLKAFTRQHIQFKPAK

SEQ ID NO: 7936 - protein, 575 aa, Xenorhabdus sp.
VTFDHNLPAHLRDEHDGLSAYWDDVGLSSFARIKMKGHILQAFIGPNLVAQSQPLQPMTVVMLRPSKVGRTFYRDTYIEGSKETPDCYSNDNITPAADAKHKQCTRCDLCPQNLPGSGINGESRACRYRQSIAVWTPGENDSTWDTIFQVNLSSTAIFGEKPNIDGYMGLNALVNWFRKQKLDPSKAWIQLYVDPYSEHKRILMKPKGYVADPEEYQQVRKLIESDELDRVLRLGVLDTEQAEPLSAEGFGQMPAHLQTPAAHTPVRNTESVNTGQETVNPFTGEIIFYDNPITDNIPTYWRHTELGAIVMLQPGTNLPVETPDIEEVTLADYQQYEAHLAEERRIAEERRIAEEQRLAEERRQSEALARRAAEANRQENGAVAVRTRTRTPVTDGQNTSDAQESGVRTRNRSAVNTLQNTSITQDSTVRTRSRRNEVASQDTVSNPEQPTQTRTRNTPADSSAVLGRRRHAAPTQTSSTGITRTRGATVTSSATEQRSADVNTPTQQRVSRRASVVEATEAEETFSNASPSLRAAQQQAAEAPDDEQPKTRGKGSLLTPEMEAALNAALLQNND

SEQ ID NO: 7937 - protein, 144 aa, Xenorhabdus sp.
MSEATLSVELTELAVKLGINNKTLGYLLPNMSASQIGRLVNASAYQAKYTDEVRLAIMVLTEIDAVGALPCSPKTVYPNILLAFAEKVQTALKYKYTLEELKHDSTWANDLSDDGELPFDDSKRDWDVIGLKNIQSLIKNSINL

SEQ ID NO: 7938 - protein, 923 aa, Xenorhabdus sp.
MSSFNTKGTEYAGRRDDHVQEVKSLWLDIDAGKEKFEKHPKWAYPSFEIAYTAFSQWLVDADMWQPNYIIASGEGLHIYWILDKPVSPEQWRVLHGGLEQLVRTHGLKMDAGASMRISGILRVPGTRHTKSGNAVRIIATESTPYSLAEMQEVLPYVQPQSNSLGAMPDFLQDENDFQDAVWGVQKKSFSFAQIIALCDIGSTNPKPGGCDQLALCYEQQSTTDEPTWRGALSIAINCFDGEEWIHKISDQYPTYSVTETEAKAQSVIDKPYTCDMFSRLNPDVCRDCPHWGKIRSPIVLGKVIEEASEEELKSIINHIPQARPVTIQDGQLPSITLLSKQVAEITEQPLPLHRDYKIASSAMGSGIWKRAKEADGKEILIYKYPLLFLNRVYSPQNGESFVMQVTMPHDPARVFELPVSELPKDQSLQGLLSKHGVTVTSKGQWGNLMTFLRRTAEQAADVRAADKQHQHYGWTDDMSAFLLGNTEFRVDGSVRPMILANNGGSMDKAFRMSEDASVAGFRKAMDLINVPDMELPQFLMGVSFAAPLFKLMGVQGCLVHSYATKSGVGKTTSARLAVSIWGRHQVDGGSGIEGLTRDTAVALYRRLGELNAITMFIDEITERQGKELTDFVYSVTQGRDKDRGLPNTNRLQENNGSWTMAVLSTGNLSLTQQLVNMNALSEALNARVIELDMSNLPSLWGRSNEHKDFVEQTFMLARTIHSGAAGRLWLRNLMRNMDLVKKLCEDVSRECQAFFDFTQKERYWTWTVSLGIAGLILGKELGVWDFDVARVMTAVKEQLERIRVNVEQDKVTPTSIFEHFISATFENRLEIRAANTPIMSNQLPSKELGLRQENYSHKLFINKGFARRWCESNNYPFDLFKAHMKLLQARDTRKHMLEGVTSIPTKSKRPNVWELDLRGETND

SEQ ID NO: 7939 - protein, 173 aa, Xenorhabdus sp.
VIPSADSLQEIPIEPKQNKAPRNKQSYVSPDALQKSEQLETQAALLRSATEDVAVAVNYPPSSVPEIPTTPPVMPDVSIPPESSFNTQVMTQLLTALARQQPLKTPRLVTAGVVNYMHVLKDIDAVEFDQKLDDLYAMLQSRAVARSENAKRLQNMTLAMHIYQEFTELWPNA

SEQ ID NO: 7940 - protein, 197 aa, Xenorhabdus sp.
MSVVIYDAQENCLYADSLCVDNYHRMTIQKIFTYHLNGTNDTSPNASEMSFHERGLAGFVGDPSIGYALIHAYMCGGMNFCEQTRKELLTHLRDTDDADTGNILIIPEKQNYMWLTSGLSVPFFPVPKQRIVIGDAQITSRVYSNLDHGMSPQEAIEDACQVSGKFDAAHLVSGPVIHVTTSSQNSELFINLNDILR

SEQ ID NO: 7941 - protein, 204 aa, Xenorhabdus sp.
VLSFLNPKGGSGKTTAVINICTALTRAGFNIAVVDTDPQMSLTHWSKSDKAAFDVFTAASEKDVYSIRKDLAEYDFVIVDGAGSLSVITSAAVMVSDLVIIPVTPSPLDFAAAGSVVTVLEAQAYSRKVDARFLITRKVEHALMLKILKESIKETGVELLRTAITNRQSYVKSILDGESVFELNDGAAKGEIEVLTKEITKLFE

SEQ ID NO: 7942 - protein, 79 aa, Xenorhabdus sp.
MALEKAHSSTKKMTFGENRDLEHVMGTSPPPEVKTKRVNVNFGEEKHKRFKAACVKNGTSITDLINKLVDDWLKENENK

SEQ ID NO: 7943 - protein, 31 aa, Xenorhabdus sp.
VEMAVEMEMEVGMEMEQGMEMAVEMAAIIFK

SEQ ID NO: 7944 - protein, 88 aa, Xenorhabdus sp.
MKTKIAKNTNPTNCDDLNGGTGQNGQNGIPGSNCINGGNGGNGAEDGGSGGNGGNGAAGGGNGGNGGNGGANGGAGGNGGDGGSGDSN

SEQ ID NO: 7945 - protein, 99 aa, Xenorhabdus sp.
VVQEMAGMAGMQETEATVMAEMAAMVELMEAMAGMEETEVAQEMAVTEVMEVKAVMEVMEVTVAQMVGMMDMMDMMDMMDNLYTNQINYHQLKLVIVYF

SEQ ID NO: 7946 - protein, 106 aa, Xenorhabdus sp.
MKSNELHVQLHETLIIELESFLRVKNIDKAMFICEALTRHMLLLDGAPPTTLLTRYEEGITRRDNVIQSLVWDYQELKRGMETLCFNIEATITDLNQDAELKKLSK

SEQ ID NO: 7947 - protein, 118 aa, Xenorhabdus sp.
MNMSELTEQMKPEYVLLDLSKEGTFPKVFVLEGEFLPATETQLARIELRSRDAQSVIYLRGSMDAQDAASAAVKKYYEHVGITISDTVVEHIVFDWPKTMKFTVVLFVVEGVLCALKK

SEQ ID NO: 7948 - protein, 146 aa, Xenorhabdus sp.
MAIETIDHSTLYRLVEAGVVSEAQVVSTLGGWVVTVKYGMTECSLAAQRSRQVRLFKKLETLVNYLKNVGIAQFNVDASNYSSEHQSKNARPDRAVALKRAHEAAAYDEWFRTQVQTSLDDPRPAIVHEDAKRHFASLKDNLRKRI

SEQ ID NO: 7949 - protein, 356 aa, Xenorhabdus sp.
MQAQLKETVWFYMQGNLAETRELLRWGPKNPACPRVSDIRAWMKILDLNTVGIARLFGVQRTTVATNYLGPKLDKQVGMTVPRLLRAALLTGYFKHNPDAPQYYAAMSLLDEIIKNGELDTIWCKIVQAKRKGAKPEVIDQLRQSAIATMCPQYPVSLSDASSMTGSDNKIPPKKVRPSREVYRMEAADKRRLNKDYSRHVIVDEDFTGATLDGIYNETVFVNCIFNKTTFVGQFYDAEFYQCQGTEILLNGLFDRAQFYEARFDVLELKGSFTFSRLISSFFGNPNGIEAQPEQFAGAEGILSYVDISLPEPRTIQGRETLSKWIQIFPAAKAWSRTTQPGTPMGDVLHAAYFGE

SEQ ID NO: 7950 - protein, 72 aa, Xenorhabdus sp.
MGDQLDGFVQRMIESGRYGNASEVMRSALRLLEQQEAHDEVIRKAVIAGLESGESALTLRDIAEQRKRKHNV

SEQ ID NO: 7951 - protein, 312 aa, Xenorhabdus sp.
ARLARTLKSHDWWRDSDLITLRQKGYIPYSERNNIHYTRKPMRVRARTESREAMTSLALALVAHADFFPGHDYLFEVMVPFEFIASTMGVLHQYENGRKAYDIALHALSVFEQMKHLVVHRDKDRDAGQNKPVRIWLTPDFFISKGIPREEIRQSLIAFQNWAVDSGQLENLNKKYQRHLLRMERLGIDIRNKHALCKLLKNIKRSVVAPDLLEEKAKAIKHIEETIDGLDKPKSENLEAELNGTQRALSRLQKKNKTSRSYWDLYVQWQYTTTPAAVYIARNKLKAQHPHLAENSDQFYRLLLEQEGVILT

SEQ ID NO: 7952 - protein, 531 aa, Xenorhabdus sp.
MLVPTEKPPVNATMIRWYMLLVGDKEAEMAQIDEQSVKTLAFVFCPDLFAGGNPLMTQTWYPVPCAEGVANIGYGAILVWSGCHIYVSAHKQPHAFPEANTLVVDDEVVRIVSFRTKTGAYQAVVLTKGVPFVIAGELPDKLTITRINRRMTSGNFTRHGSGKILPAFFAFWNAGMQSLPLISSIMSTQVGRFGLMGLGILAAAATQSALDDPDDEDTDGGSKFARSQSRKKSICFGDICGEMPYEVRPFMLSIQNLVLLGHGKIDMGEAVGSLLRSAAETFVPVQPAGDVDSYTVTRMMLPTAAQPLITIGMGVNEFGQEVDNKYPVDWSGKQITTPANVERGKTTTPEFLKDMTRFFYEKSNGMVDISPARTDALLSSLFGGIYNMVRNTTTPPLRPVGWGDNAILQTATSAYRYKTNNYAVTQKYRELITQATAAGRLNNLNDEGSYNVLMKNDPVAKIENQRAKAMRNLRVEGLTRSQLNGALDKAFYDGDEAAIAHYQELMRQYDDESSLIYGKALIELQDIVNEH

SEQ ID NO: 7953 - protein, 380 aa, Xenorhabdus sp.
MSCCENDRTLGNRPMRRGAPGESAYEFWKEQQPPGSDTSPCAFEKFMEGKTGESAYEFWKSRQLPGTDTSEQAFADSMKGKVGPTIEDKISARDQSIITQQTIVDETHKTTTIGVQLSSKKENALTLEKDGLFSPLSESGKLVFDPTFFSGKGTQTDPYKVMINNSQTNILGWSPNGLNVPLLFDSNAFNFVQGYNVQLRISKKAGNTLTVEDDGLFSPQSENEKLVFDSSFFSGHGTQADPYKVKINSNAPSILNWSPDGIDALLSFSKAFKVTQGNDIHLNISVKDGNGLKFTPEGLYVVGVDPTVPQCLSLTSDTKDAGSAGAITEDDTGAIAIGAGSQATGRQSIAMSSNTYATADHAIAIGAYSSAKENSVAMHG

SEQ ID NO: 7954 - protein, 163 aa, Xenorhabdus sp.
MYEGTLGLELYYSLDKVKHLTDNDWDKLILEARKKDIVVIGNKDDTRQCIQFCRGEFQTTMQDIYFEALDMTPYDEGDQMFHEWLKLNISATDLGKLLGVSVFYACCAPGGAHAGAEIPQHIVEQAKQAYLIITFRYHLRVINEREYEHKVPHDQIHGRCSDD

SEQ ID NO: 7955 - protein, 217 aa, Xenorhabdus sp.
MLTNTVKTQKKSAANATIAAAAIADMKKVKETVAKHDQYKLNGLDARKTLINEVYRVAKADHKLKAEVFIFYVTQIVKKGSVLETVLPFFKQEIKDMFDRGELKATAIDSNTDECVNADVVFNNLRRLFNAAKSRYDNAKNGGKGADTRDDEIKAKSFLAVTKMCDIAEGFTMLPQARQYKLIKSLFLQLDPTNRLDLLLELDAMKEQPIPEIDEIK

SEQ ID NO: 7956 - protein, 238 aa, Xenorhabdus sp.
MQTPHILIVEDEIVTRNTLKSIFEAEGYVVYEATDGSEMHNILSDNDINLVIMDINLPGKNGLLLARELREQANVALMFLTGRDNEVDKILGLEIGADDYITKPFNPRELTIRARNLLSRTMNLSHVGEERRQVESYRFNGWELDINSRSLVSPMGDHYKLPRSEFRAMLHFCENPGKIQTRAELLKKMTGRELKPHDRTVDVTIRRIRKHFESTPDTPEIIATIHGEGYRFCGDLED

SEQ ID NO: 7957 - protein, 293 aa, Xenorhabdus sp.
MDQTNIIRDLLHWLDNNLDRPLSLDHVAAKAGYSKWHLQRMFKDVTGQAIGSYIRARRLSKAAVALRLTGRPILDIALQYRFDSQQTFTRAFKKQFNRTPASYRRSEEWCASGLCAPIMLDNKPLPEHKFVILEDQLLTGIEHSCSYTLEQWSKACTEMRHNYWIAYLQHAEVLPPKLYGLHHSTVSAEHEDEQTVFYTTAIEPEYATFDTKDSQPVVLPGGEYISFSYFGKEDQLDEFLSNIYTVCLPQLNITRRKGYDVERYYLTNLERKKLQDESQSHVVEFEYLIPIQR

SEQ ID NO: 7958 - protein, 177 aa, Xenorhabdus sp.
LFIMYHVIAATTNPAKIKAISLAFDDVFGAGTYRIEDVDVDSSVPQQPIGNTETRTGARHRVMAARQVRPEADFWVGVEAGIEDDMTFAWMVIEYKQISGESRSASLMLPEKVLESIREGRELGHKMAYLTGVDNIKQKGGAIGFFTNGILTRTSVYHQALILALVPIHHEIYKDIE

SEQ ID NO: 7959 - protein, 555 aa, Xenorhabdus sp.
LAQYVYSMHRVGKIVPPKRHILKNISLSFFPGAKIGVLGLNGAGKSTLLRIMAGIDKDIEGEARPQPGIKIGYLPQEPKLNLEHTVREAVEEAVGEVKHALTRLDEVYAAYADPDADFDKLAKEQGELEAIIQSHDGHNLDNQLERAADALRLPAWDAKIEHLSGGERRRVAICRLLLEKPDMLLLDEPTNHLDAESVAWLERFLHDYEGTVVAITHDRYFLDNVAGWILELDRGEGIPWEGNYSSWLEQKDARLAQEAASEAARRKSIEKELEWVRQNPKGRQAKGKARLARFEELNNVEYQKRNETSELFIPPGPRLGDKVLEVSNLTKSYGDRVLIDDLSFSLPKGAIVGIIGPNGAGKSTLFRMLSGQEQPDSGSIALGETVTLASVDQFRDAMDDKKTVWEEVSGGQDIMRIGNFEIPSRAYVGRFNFKGVDQGKRVGELSGGERGRLHLAKLLQVGGNMLLLDEPTNDLDIETLRALENALLEFPGCAMVISHDRWFLDRIATHIIDYQDEGKVTFFEGNFSEYEDYKKRTLGAEALEPHRIKYKKISK

SEQ ID NO: 7960 - protein, 218 aa, Xenorhabdus sp.
MSKAKLKFRLHKTAIILICIALLVLLMQGVSYFSRSQQQAHMDQFEDLAKTLAKQVAFSLSADMENGSKEVNNQKIMDNLNYLTNKSRILDASVYQENGTLVARSGELVSVRERLSLDGKKAGSYFNQQIVVPIPGKNKPKGFLRLTLDTHRLATEAKQVDNTTNLLRVMLLLALAIGFILAHNLLQLAPSRWQQSPYLLTAKTKSPDENNKEDESAR

SEQ ID NO: 7961 - protein, 283 aa, Xenorhabdus sp.
VKTETQQGEAQKTDEAATAEQPTVTTEVTEITEAGAVETTAAAETENLSSGFATDLSVFGMYQNADAVVKSVMIGLVIASIITWALFFSKGSELLIARRRLRKEQLALADVASLDEAVKISSDFAKNSISRLLLSEAQTERSLSAESTDKDGTKERTSFRMERAVAAISRHMGRGNGYLATIGAISPFVGLFGTVWGIMNSFIGIAHSQTTNLAVVAPGIAEALLATALGLVAAIPAVVIYNIFARVISSYRGQVGDTAAQAILLLGRDLDLADRKTDKAEAR

SEQ ID NO: 7962 - protein, 141 aa, Xenorhabdus sp.
MAIRLNEDLDDSGELHEINVTPFIDVMLVLLIIFMVAAPLATVDIKVDLPASTAKPQPRPEKPVFLTVKADSQLFVGDQQVDRDSLSSVLDQTTQSNKETTIFFQADKSVDYETLMSVMDSLRKAGYLKVGLVGMEAVEAK

SEQ ID NO: 7963 - protein, 413 aa, Xenorhabdus sp.
KQSKNMRIIHTSDWHLGQYFFTKNRAAEHQHFLQWLIRQINEHQVDALIIAGDVFDTGSPPSYARELYNRFVVDLQPTGCQLVILGGNHDSVATLNESKTLFSYLNTTVIACAETDTQQQIKVLNNRNGQAGAILCAIPYLRPRDIIFSKAGQSAIQKQQALQDAIAEHYHQLYQQACSLREQLGQSLPIIATGHLTTVGASTTDSVRDIYIGTLDAFPAQAFPPADYIALGHIHRPQSVNKTEHIRYSGSPIPLSFDEVGQEKSVCLADFKEGKFNRLTLLPIPNYQPMQLIRGNLQQIEAQLQTFSDYQGERPVWLDIEVATQDYLHDIQKRIQTMATDLPVEIILLRRSKTARQISLSEKNKETLTELSVSEVFERRLAMAEIDDQPQKQRLTTLFRQTLDDITQQRTQK

SEQ ID NO: 7964 - protein, 1231 aa, Xenorhabdus sp.
MKILSLRLKNINSLQGEWKIDFTAEPFASNGLFAITGPTGAGKTTLLDAICLALYHRTPRLKTISDNQNELMTRHTAECLSEVEFEVKGVAYRAFWSQRRARNQADGRLQQPKGELADKKTGKILADKIPDKKEKIAEITGLDFKRFTKSILLSQGDFAAFLNADDKDRADLLEELTGTEIYGILSQEIYQRHKEAQSELNIQQAKASSIELLTAEQLEEYRNQQQQLIAAEIQLGQQLKDLQITEQWIVRQHELEQSLMNHKLSLQQTEQAIQDASPQLQQLTASEPAEKIRPLWDAYNRALTEQQRLDEQSRKIQFELQRQVALLQPAQQKQINLEQAKKEYQQHHIQQEKLISEQVTPLDHKIDIQSKDLLTLEKEATVQNQELAEISSQYQLAENQHISLNKEQKVLETYDEEHPHFRTLDRQLPKWQQLFSRQNEKQEQITKLRQKQQQMATELARTTENLNSLNTVLEKQAAQCQPLQDSLELAEKKLLSLQTQYSSDQLQKQLSDYQSQLNSQNQLEIFLPQIEQIQTTISTNQAQFAQIQSFLKPLPEQLNTLEIQLTETQQHHQDLTARIRLEQRIISLEQERNQLKEGEACPLCGSNYHPLISEYQNITLPKSEERLKTLSQKIEQLQGERSALQQKQQFQQQQSEQLQQSTERFTSQLTEITTQWQHHCQQLQAPELPMEAEPVRHFITLRQSAYTQSQKQYEILTQAEKQYHIAEKTLSAHREQYKLDEQKSALEKVRQESYQRQLKENTAELHQAETEYATTTGQLIDTLHDTPFTLPEPQEVGNWLQQRETELKNYHRSREKWQQLQQEQAALQSKLNELEKQKSRIINKQQILAEQLQQQNQVLQQTQQERYQLFGEQSVSTVRQELQQKASELDNACKQATADLQQLQNQVNQLTGAAGEITRSYHIAEAAYKQASDTFQQGLQQQGFPDQPSFEQALLAPEQRESLQQLQEQLAKQNLQAKTRCHESEILLQHHREKTPLLLEQFEPSQLAELLSNTANELKQNNQQQGEVKNRLTSDANSRHHQQELLDQIALSQQNYDDWSYLNNLLGSADGAKFRRFAQGLTLDHLVHLANSRLEKLHGRYYLQRKRQNKDDVGLELQVVDMWQADAIRDTKTLSGGESFLVSLALALALSDLVSNKTQIESLFLDEGFGTLDSETLDIALDALDHLNATGKTIGVISHVEAMKERIPVQIKVEKMNGLGVSKLESEFRVR

SEQ ID NO: 7965 - protein, 164 aa, Xenorhabdus sp.
MERFIENTMYASRWLLAPVYFGLSLALFALAIKFFQEIIHVLPHIFSIAESELILTLLSLIDMALVGGLLVMVMFSGYENFVSTLDIEEHKEKLNWLGKMDATSLKNKVAASIVAISSIHLLRVFMDARNVPDSKLMWYVIIHLTFVVSAFVMGYLDKLTRHHH

SEQ ID NO: 7966 - protein, 384 aa, Xenorhabdus sp.
MNLTPGGNAPVSNQMLTIRVLSGSAVDVSAFRLYADGKVQGDPDMVFYGQPDNDDNTIRLSGGNTNTAFSVNLPALRQDVQKVAFTATCDGSQTISSLHSLSIQVELNGGVILQGHVEVQGRTEAALILGELYRRNGEWKFRFIAQGFNGGLKPLAEHFGVDIVDDAPASPPTPAPEPKSVNLSKVSLTKEKPAISLSKRDNFGEIRVNLNWNQGAAPASRGMFQNLFNTSKGVDLDLGAFVRLRDGTRDVIQALGNGFGAYHSEPYVQLQGDDRTGSVTDGEWLHINGLEWKNIREVLIYAFIYEGVPSWNNTDGIVTIYVNGQPPIETRLTEGHNRKNMCAIARLVNDNGAIQVERINQYFSGHKEMDQAFGWGFRWTSGSK

SEQ ID NO: 7967 - protein, 151 aa, Xenorhabdus sp.
MSFLNKIKSAFSAGREELTNQVGRFKNKKFMEGTVAVCAHVAMASNGVSSEEKQKMVGFIKSSPELKVFDTTEIIDFFNKLVSSYEFDADIGKGEAMKYIMALKQQPEAAQLALRVGIAVAKSDGDFDNDEKNAAREICTALGFVPADFDL

SEQ ID NO: 7968 - protein, 60 aa, Xenorhabdus sp.
MRTGIPWRELPAEYGKWNTVFKRFNVWSKKGVFNSLFNELAKNSDTEWLFIDGSIVRAHQ

SEQ ID NO: 7969 - protein, 154 aa, Xenorhabdus sp.
KKIVIAVVLLCSPTILHAEEIGSVDTVFKFFGPDNKIVIEAFDDPDVKNVTCYLSRAKTGGIKGGLGLAEDTSDAAISCQQVGPIEVAEKILKSPKKGQVVFQKRTSLVFKKLQVVRFFDPKRNSLIYLTYSDKVIDGSPKNAISAVPIMPWKE

SEQ ID NO: 7970 - protein, 215 aa, Xenorhabdus sp.
MLQVYLVRHGETEWNLARRIQGQSDSPLTETGRRQALLVAQKVKSENITHVITSDLGRTRQTAEIIAQACGCEVILEPRLREINMGVLENRDLNSLTQEEETWRKSLVDGTPNGRIPEGESMSELSERVRAALESCRDLPAGSRPLLVSHGMALVSLVCSILGLPANSERRLRLRNCSISRVDYQDSPWLAPGWIVETAGDITHLDMPALDELQG

SEQ ID NO: 7971 - protein, 41 aa, Xenorhabdus sp.
MSQRELKNELSVGIATITRGSNSLKSAPAHVKEWLETQLLK

SEQ ID NO: 7972 - protein, 106 aa, Xenorhabdus sp.
VKLGDKSRYYPGELSENERQRAAMAKAIVKRPEYLFADEPTRHLNHQELKMFIDIFKFIAHEQKGTVVIASQDKRLIQYADSMITLESGKIVKTYESFQERRVMVS

SEQ ID NO: 7973 - protein, 410 aa, Xenorhabdus sp.
GYMGQFDYLKEAIKQANHTLQQVADASGMTKGYLSQLINGKIKSPSAQKLASLHQHLGLAYPMEKKTIGVVFGKFYPLHTGHIYLIQRASSQVDELHVFLCYDELRDRELFINSSMSQQPTVSDRLRWLLQTFKYQKNIHIHSFDEQGIEPYPNGWEKWSQSAKQFMSAKGINPQYIYSSEAQDVPLYKEHFGIETILVDPQRSFMNISGSQIRQAPFRYWEYIPTEVKPFFVRTVAILGGESSGKSTLVNKLANMFNTTSAWEYGREYVFSHLGGDEMALQYSDYDKIALGHAQYIDFCVKYANKVAFIDTDFVTTQAFCKRYEGKEHPFVQALIDEYRFDLVILLENNTPWVADGLRSLGSEQDRKAFQQLLESMLKKNNIDYVCVNSPDYDQRFLQCVELVQEMLAY

SEQ ID NO: 7974 - protein, 461 aa, Xenorhabdus sp.
VAKAAKRAFVCNECGADYPRWQGQCTACQAWNTITEIRLAAASSPRNERFSGYAGDTGVSKVQKLSEISLEELPRFSTGFKEFDRVLGGGVVPGSAILIGGNPGAGKSTLLLQTMCLLSEQMKTLYVTGEESLQQVAMRAHRLGLPTDKLNMLSETSIEQICLIAEQEQPKLMVIDSIQVMHMADIQSSPGSVAQVRETAAYLTRFAKTRGVAIIMVGHVTKDGSLAGPKVLEHCIDCSVMLDGEADSRFRTLRSHKNRFGAVNELGVFAMTEQGLREVNNPSAIFLSRGDEITSGSSVMIVWEGTRPLLVEIQALVDHSMMPNPRRVAVGLEQNRLAILLAILHKHGGLQMADQDVFVNVVGGVKVTETSADLALLLSLVSSFRDRPLPRDLVVFGEVGLAGEIRPVPSGQERISEAAKHGFKRAIVPYANMSKKSLPDMKVFGVKKLSDALSVLDDLDD

SEQ ID NO: 7975 - protein, 325 aa, Xenorhabdus sp.
MSNNLAYRYLPDEIHKWPGLPLSLSGDEVMPLDYRAGDRGWLLYGRNLDKQRISDFQHRLGVAIVVVSSWRIDDYQVVRIAGGLSPRIKRLADECCLDVVPLGQIPRLRSPGLLVMDMDSTAIQIECIDEIARLAGVGDKVAEITERAMQGELDFSESLHQRVAQLAGADAAILQQVMDTLPLTSGLTSLVRKLQSLDWHVAIASGGFTFFADTLRQQLRLFASVANQLEIKDGKLTGKIKGPIVDAKYKATTLIRLAKELDIPLSQTVAIGDGANDLKMIRKAGLGIAYHAKPKVYTHAKVGIRHADLMGVLCVLSGGLKHEER

SEQ ID NO: 7976 - protein, 281 aa, Xenorhabdus sp.
MGQQTIIKLVDGNLMPQLGIGVWQASNEQVVKAIDTALNVGYRSIDTAAIYHNETGVGKALRESCIPREEVFITTKLWNDRHQDAKTALQESLDRLQLEYIDLFLIHWPVPQQDKYVETWKQFIELKESGLARSIGVCNFHIEHLQKLFSETGIVPAINQIELHPLMQQRQLHSWNATHHIITESWSPLSRGGKGVFDHPLVESLAIKYDKTPAQIVIRWHLDSGMIAIPKSVTPSRIKENFDVFDFRLEKEDLTIMAGLDIGKRLGPNPDTYNLTVLNLG

SEQ ID NO: 7977 - protein, 168 aa, Xenorhabdus sp.
MEKVFVIQLVRIVVMQNFTLHTPTKVIFGKQALNGLVGAGVPQDWATHMLAHQLTAFHNLDHAQTLAIILPHLLQEKRDTKHAKLLQYAERIWHFTEGTEEQRINQAIHVTREFFESLGVKTHFSDYQLDGSSIPGMIQKLEQQGLVALGEHQNITLEVSKRIYEASI

SEQ ID NO: 7978 - protein, 223 aa, Xenorhabdus sp.
METLSGIVQALWQHDFTLLANPDVIWIIYGVIFVTLVLENGLLPAAFLPGDTLLILTGALIAKGVMGFVPTVILLTIAASLGCWLGYLQGRWLGHTRMIKNWLAQLPAEQRQRANVLFAKHGLTALLIGRFLAFIRTLLPTFAGISGLNSKRFQFFNWLSGFLWVIIIVSFGYALNQIPFVKAHQDLVMNILMILPVILLISGLGASLLMYWRHKKASSHKNK

SEQ ID NO: 7979 - protein, 397 aa, Xenorhabdus sp.
MSEKKLETRLVEVGRKRKYTQGAVNPIIQRTSSVIFKTVDAMRHAIKNRANGELFYGRRGTLTHFAFQEAMAELEGGVGCALYPSGTAAITNSILAFVETGDHVLLTGSAYEPTQEFCKNILKKMQISTDYFDPRLGEEIALLIQPNTKVIFLESPGSLTMEVQDIPAIVQAARRVNPDIVIMIDNTWAAGVLFRALDFGIDISIQSATKYIIGHSDGMLGTAVANQRCWDQLRESSYLMGQIADPDTVYSANRGLHTLAVRLKQHEESSLIIAKWLSQRPEVAEVYHPALPSCPGHNYFQRDFTGSCGLFSFMLNVSLTPGQLSDYLDNMQYFKMAFSWGGFESLILGISPESLAVLRNYNFPQKTGTLIRVHIGLEDPQDLIDDLNAGFSRIALS

SEQ ID NO: 7980 - protein, 86 aa, Xenorhabdus sp.
MIEYSVIVTAPSGLHTRPSAQLCNLAKTYSGTVEIIRGDKVANLKSMFKIMSMGIKNGMEIIVRVEGENEEEMAKSVVDLIRSIKE

SEQ ID NO: 7981 - protein, 471 aa, Xenorhabdus sp.
FPETFLWGAATSAYQVEGAAEKYGKKLSQQDILNNKPGLADSHITSDHYHRYKEDVALMKELGLKAYRFSIAWSRIFPDGIGKPNDEGVQFYHNLIDELLENGITPIPTLYHYDMPMALVEKYHGWIDRQSVNDFAYYAEFVIREYGKKAKYWLTINEQSIIVQFWTKKCFIPEQYLDNEQIKYQINHHMNLAHAIACKLVHQWVPEGQVGAALGYSAIYPLTSKPEDNLAAQNANDLRNYYFTDIYLKGEYNQSALIYLKNQGLAPNIEDGDMALIKEGYSDFLALNYYCSHAATAAPEGAQRRMDGFNPTGIKGQMDGYEIQPDYYQIHKNPQLDTTDWDWTIDPHGLEYLLRDLYTRYQKPLMITENGFGADDVLESDGTIHDSYRIDYLKQHLQAIKRAMDSGVVVLSYNPWSFIDLLSTSNGYKKRYGFVYVNRTDDDLKDLARYKKDSFYWYQNVIQTRGGSLTE

SEQ ID NO: 7982 - protein, 108 aa, Xenorhabdus sp.
MEIILDAGNAREKSEKAMKFARNGDFENARIYMEKARKMMLSAHQTQTDVIQKETQGSDINLSLLFIHAQDTLMTIRSELLLREEIIDLYKHIKNVNDNKGKNHHDEK

SEQ ID NO: 7983 - protein, 411 aa, Xenorhabdus sp.
MKAFMSWLSDSFAPAMQNFTKRPWVAAISGSMQKNIPFILAGSLIFFYNVFRSYLPFLPNLGRIAEYSFGMLGLITAFMIANQMMEKLHHFRYTLIAGLTSICVYMMFIKPEFSDGNMIVSFERFGPAGILLGIVTGLFVSYLFHLYTKIGFLKDSTLPDFVTGWIHAIIPILLSIGIGTLLVFTFEIDIFSRLLYLFSPIAAFGQTLPGFILMALIPAIAFSMGISVWTFTGLQMPIFMLGISTNITLVAAGQAPTNIVTYETMYTAALITMGGTGATLALNLLMLFSKSRDLKATGYICIGPSFFNINEPLVFGTPIVLNPLLMLPMWINAITSPIIIWVFMRSDWLNIPAKMIQVGQIPAPFSSVMITEDWRAIICYLVLMAVFLVTWYPFFKVYEKKRIEEENLNAA

SEQ ID NO: 7984 - protein, 433 aa, Xenorhabdus sp.
VLEKLSWKKLVLGLFIFCLPAVILSFFVGQLAWLLVIALLLALVWHGYNLLKLSDWLWLDRSMLPPAGRGGWEPVFYGIYQLQQRNRKRRRELALLIKRFRSGAESLPDALVMMTVEGNIFWCNRLAQHLLGFRWPEDNRQSIFNLLRYPDFSRYMIAGDFTSPLSLELNNGHIVEFQLMPYSESQLLMIARDITQKRRLENSRRDFFANASHELKTPLTVLQGYLEMMQDQELSGKASQKVVSTMQEQVRRMDSLVSQLLHLSRIESGSKVDVHNMVDVPAMLALLEQEVQTLADKQHDIVFNVDNTLHMHGSEEQLRSAMSNLIHNAINHTEQGTRIEVSWLRTVHGALFKVEDNGPGISPEHLPRLTERFYRVDRSRSRSAGGSGLGLAIVKHALHHYNTHLDITSTVGKGSVFSFLLPLQFIASDTKND

SEQ ID NO: 7985 - protein, 306 aa, Xenorhabdus sp.
QLGATLYIPATRPDIPEIILCNKVVGLRSLVICLEDSVVEEDIPVAIENLVSVLQILAAAKGSAANTDHYPLIFIRPRNESMGRYLVNTVDLSLVTGLVLPKFTQSLLPEWWDIIASTHLGVMPTLETEDVFDVQQMNYLADKLKSHPFCERVIALRVGGNDLMNLISIRRSRELTLYDGPMGYVIKMLVAVFGSRGFYLTAPVCEHIDNLELLEKELVLDIAHGFVGKTAIHPRQIEYIHKALMVNNHDYADALKILNTKQAVFKFQGAMCEPATHWRWAVNILERAKYNGVCSGSETENYGVFN

SEQ ID NO: 7986 - protein, 333 aa, Xenorhabdus sp.
MTPVEIKEHLIQSGARHYSEMLSQEPEPTSYHLELFDKALEIGATRLATEVVMLAKALISRFGDTPIVLVSLVRAGVPLGVMLHQVLRDMGQSSYHYGISIIRDRGIDDTALSYIEQQHGTAGLVFVDGWTGKGAITAELSRSLAGRPGYSGIPRLVVLADPCGCSWLAASDDDWLIPFGIMGAPVSGLISRSIWSENGLHGCVKCDHLSEFECSGMLVDTVAECRDHLDLTAIPAADWQPQEKMVLLQLSKKVISTLADLYEVNSINRIKPGIAEATRAVLRRVPEQVLVRSKNDPDVALLVYLAQQKNVAITEVGDLIGQYRAVTIIKKVA

SEQ ID NO: 7987 - protein, 220 aa, Xenorhabdus sp.
MTEQQAMLVDWLLANAEVIPVTARNTEQLSRVQLPFTSWRIATHGAVLLTPEGHADQVWQSHMLAELQPYRDKLLELECQGNRLIASGGFSVWSRINYEYGDIPVYISFKCNKHNQAEELKTLLTAVTQVMSDIFDADDFYFHYNNNNLAFLPKCVDKGLATHHLLQRLHDERGVFPVIGMGDSLSDHRFMKWCDWLAIPQRSQFADTLTASLFGMRNPK

SEQ ID NO: 7988 - protein, 366 aa, Xenorhabdus sp.
LNSGTLTVTAECGETSLEALFDIAERRNPKRAFLFVSKVLGRHIPVSPSIMRTVYQQLSDKFPVDLPGPVLYIGMAETAVGLAAGVFQETRHKVTSPIFLTSTRHPVEGELLCEFKENHSHATDHLIYWPKEEHLRQRVSHARTLVLIDDEATTGNTFLNLFEALHRAGLEHIEHIITVTLTDWSGQSIIKRCPLPVSVISLIEGEWQWDADSSASVPVMPAVNITARGKVDIIGTQNWGRLGLDDIQYDLGAEIPANVGEKVLVLGSSEFVWQPFLLAERLEREGAAVKFGSTTRSPISCGHAIQSVMAFTDNYGLGIPNFLYNVAHQQFDRVLLCLETPKAAVDPHLMEQLSLVAPVIEIVTYD

SEQ ID NO: 7989 - protein, 248 aa, Xenorhabdus sp.
MQKVTIITGGSRGIGKATALDLAKKGHHVCISYRSRRERAQEVVDMIQSLGQSALAVQMDVTDEQQVTALFQKAEKELGYITGLVNNAGILKAQTTIEQLTAERLNEMFATNITGYFLCAREAVKRMAFRHGGQGGAIINVSSAAARLGAPYEYIDYAASKGAVDTLTTGLSLEVAAQGIRVNAVRPGLIYTEMHADGGEPDRVDRIKDSLPMKRGGQPEEVAAAIAWLLSDDASYVTGNFMDLAGGK

SEQ ID NO: 7990 - protein, 204 aa, Xenorhabdus sp.
MYKKQKMEYLRKNLQYLLDSRGETRVSLCDRTGLNRTTIYNILDGRVQSVHSSTIQKVSNFFGISYSEIEAIDIAEKERIDAIVSYEGNMNPCAVPLFMQSECVTAEFYESKIGTLIVGRTLTYYFGSGPNIVAILLENDFSGKYNAGDLLIVRRGNYQSDNPKLCFDPKQKKFHINESCVENSDDFAVIGDIMEERFGYGKKI

SEQ ID NO: 7991 - protein, 159 aa, Xenorhabdus sp.
MSAFVEKKLPIPPFNYETATQKVRIAEDSWNTRDADKVVLAYSKDTRWRNRTEFVNGRDEAKKWLVRQWIKEKSYRLIKELWATEGNRIAVRYAYEWHDDSGNWFRSYGNENWEFDEHGMMINRFASINDIPINEDERKFHWPLGRRPDNYPGLSELGL

SEQ ID NO: 7992 - protein, 109 aa, Xenorhabdus sp.
MERVPLLALLFTLTVSISACKPADPCQVDGSSFLTCLRLADEGDAVAQYKIGKMYEKGLGVPLDNQEAIRWYTESAQQGNTDAQADLHERYSLLFDSAIFASSALRTRL

SEQ ID NO: 7993 - protein, 48 aa, Xenorhabdus sp.
VPLCSYLTQLKGNPTGIAFIDSTRLSVCHNIRIPRHKVFEGTAQRGKT

SEQ ID NO: 7994 - protein, 120 aa, Xenorhabdus sp.
VVRELAKELIGSLYGDKGYLSQELANDLAQNGVTFITKKRSNIKASVLEDWDKIMLSRRFIIETVNGQLKYICQIEHSRHRSIKGFLLTVLTGLIAYCHKKKKPSLKVFYSEEEDIPVTA

SEQ ID NO: 7995 - protein, 102 aa, Xenorhabdus sp.
VVGFFVAPFDKNTWAVWLSDAGRWASSAKIYWAYGRAKNDNDGGKSIYAALLAAQASGQKVNIRDDGFGDGDIQHIKCEKAHFTPESVYTGSKFDSVEIWFP

SEQ ID NO: 7996 - protein, 182 aa, Xenorhabdus sp.
VIPCADCAGIETTLQLAKDGSYILEQTYLKSGQEEPFFDTGHWIVNGKKINLTSGEEGKKAYYQMKGENLVMLDINGEPIQSKLNYELTKVTPQKLAGEYIYFADSATFTECRTGKLYDASENIDLERGYSATGIAGGKPVYVEVEGYYTLRPSMEDGLFDNAIIQTGKIHFDKSSSCQTKK

SEQ ID NO: 7997 - protein, 295 aa, Xenorhabdus sp.
MNNLVEIFIDVDDFCRFFIPQWEQFCLNKGYRLRRRKGHMYPSEIMTILILFHLSHYRDFKNFYLEHIWRYHHHDFPTLLSYTRFISVAPSVLVPLCSYLTQLKGNPTGIAFIDSTRLSVCHNIRIPRHKVFEGTAQRGKTSMGWFYGFKLHLIINHLGEILALKITAGNTDDRKVVRELAKELIGSLYGDKGYLSQELANDLAQNGVTFITKKRSNIKASVLEDWDKIMLSRRFIIETVNGQLKNICQIEHSRHRSIKGFLLTVLTGLIAYCHKKKKPSLKVFYSEEEDIPVTA

SEQ ID NO: 7998 - protein, 2347 aa, Xenorhabdus sp.
MYSANVLLNKINQTRDGQSMTLADLQPFSFSELRKMFEEQLSWGETRYLHHEAVEQGKRHRLLEARIFTRTNPQLSGAIRLGIEQDNLSRSYNEMFGSRSSSFVNPGSVASMFSPAGYLTELYREAKDLHFNSSAYHLDNRRPDLANLTLSQNNMDAEISTLSLSNELLLEHITRKTGKDSDALMENLSTYRQAIDTPYHQPYETIRQVIMAHDSTLSALSRNPEVMGQAEGASLLAILANISPELYNILIEEITEKNADALFAKNFGENISPENFASQSWIAKYYGLELSEVQKYLGMLQNDYSDSTSVYVDNISTGLVVNNESKLEAYKITRVKTDNYDKHVNYFDLMYEGNNKFFIRVNFKVSREFGATLRKNAGTGIVGNLSGPLVANTNFKSNYLSNISDNEYRKGVKIYAYRYTSSTSATNQGGGIFTFESYPLTIFALKLNKAIRLCLASGLSPNELQTIVYSDNAQGIINDSVLTKVFYTLFYSHRYALSFDDAQVLNGSVISQYADDDNISHFNRLFNMPPLKGKIFEADGSTVSIDPGEEQATFVRSSLMRGLGVNSGELYQLGKLAGVLDSKNNMTLSGSGISSLYRLNLLAYAHQLTVNELCMLYGFSPFSGKKMASLSSEELARLVIWLYQVTQWLTEAEITTEEIWLLCTPEFSGNISPEINNLLNTLKIRISEDIAQSGDRELQAEILAPFIAATLNLTSPDMARYILLWTDNLKPGGLDIARFMTLALKETLNDDETTQLVQFCHVMAQLSLSVQKLRLSEAELSVLVISGFSVLGARSQPAGQHNIDTLFSLYRFHQWINTLGNHSSDTLDMLRQQTLKADRLASVMGLDISMVTQAMTCAGVNNLQNWENINTVQQWMDVASELHTMPSVIRTLVNIRYVTVTNKAAPELPSWNEWQTLAENMEAGLSTQQALALADHTAERLSSMLCNWFRRNIQPEGVSLQSRNDLYRYFLIDNQVSSAVKTTRLAEAIAGIQLYINRALNRIEPNARADVSTRQFFTDWTVNNRYSTWGGVSRLVYYPENYIDPTQRIGQTRMMDELLENISQSKLSRDTVEEAFKTYLTRFETVADLKVVSAYHDNVNSNTGLTWFIGRTRENLPDYYWRNMDISRMQAGKLAANAWKEWTKIDTALNPYGDAVRPVIFRERLHLIWVEKEEVAKNGIDPVETYDRFTLKLAFLRHDGSWSAPWSYDITEQVMAVTDNKPDIERLGLAVSGFQAEDTLLVFVYKTGKDYNDLGGSNKNVAGLYIYSDSTCNPMNVEQLSRYSIIKNTFDTIPSNGARIVKRANYKFAQDFDIPGSLALNSSSNHNSSVAIDNASIPQISYVYSSESLVITLNNPEFTLNYRVNANDDLRRSQLVAMKACGRQGDNFIYADKVTQGNWVGLERIDGPICVYNATNDTIGLTLNYLFNLPENSYSFINLSGENTEGPLFSFSISNHETVINFPVGSNRQNDFKKCNYAFCTVVSDDDPLAIAHSWATTSNWLYLNTDVDAKNILFSANVTGEVYTFTAEENIKELPSPSFEGMNYVFNPIVLNASDLTFIHNIASIDLYFEIKDENGRNIGKASSTLTIKKVNYSPDSILHLYDTDAGVQYMQLGVYRIRLNTLLAPQLVSRANTGIDSILTMATQQLPEPQLGKGFYATFTLPPYNPATHGTSRAFKLNLKHVVDNNVHVIYSGLLQDIELAVRLFIPLDDTPLNNEYIAKVFLTTQKSPNDVAKSGPHFKYDKSNNNEIVINPDHSNTSMFAGVQIHNGTTTEPLDFNSACALYYWELFYYTPMMCFQRLLQEKQFDEATKWMNYVYNPAGYIVNGEIAPWTWNCRPLEETTSWHANPLDAIDPDAVAQHDPTHYKVATFIRLLDQLILRGDMAYRELTRDALNEAKMWYVRALELLGDEPEDYGSSQWAAPSLSVAASQTVQAAYQQDLAVLDSGEVTTQSRTANSLVGLFLPEYNPALTDYWKTLRLRLFNLRNNLSIDGQPLSLAIYAEPADPKALLTSMVQASQGGSALPTGTLSLYRFPIMLERARNLVGQLTQFGTSLLSMAEHDDADELTTLLLQQGMELATQSIHIQQRTVDEVDADIAVLAESRRSAQNRLEKYQQLYDEDINHGEQRAMSLFDAAASQSLAGQVLSTAGGAVDLAPNVFGFACGGSHWGAPLHAAASVMSLSATASQYSAEKISRSETYRRRRQEWEIQRDNADGEVKQMDAQLETLKIRREAAQMQVEYQETQQAQTQAQLELLQRKFTNKALYSWMRGKLSAIYYQFFDLTQSFCLMAQEALRRELNDNGVTFIRGGAWNGTTAGLMAGETLLLNLAEMEKKPGWSVMNGHWK

SEQ ID NO: 7999 - protein, 178 aa, Xenorhabdus sp.
VTRTVSLAQVYQALPSDSFNLAEKLTQFLRDGKGNAGITGNELKLSSGQIAASVRLSDLNIFSDYPDKSLGRTRQLKQVSVTLPALIGPYEDIRAVLNYGGSVVMPRGCSAIALSHGMNDSGQFVLDFNDTRYLPFEGIPVNDNGSLTLSFPDATDRQKALLESLSDIILHIRYTIRS

SEQ ID NO: 8000 - protein, 109 aa, Xenorhabdus sp.
MIPPRSALKKDKQASEYHRRKIDELGDPLLVLDKYVDFSALADTLDRIVPRIISPKGGRPPFPTEVMVRIIILKHFHNLSDEKMEYQLLDRMSWQRFCRLTDVINIPGP

SEQ ID NO: 8001 - protein, 353 aa, Xenorhabdus sp.
MFIGFDYGTSNCAVAEMIGNTPQLIAIENDNFYMPSALAAPTRESVSEHLFRHRNITPGSPVGEQLLRSAITANREEGIELLPEDIVFGQAALTRYLEDPQDTYYVKSPKSFLGAMGLREVQISFFEDLVCAMMSNIKQQVESKTQQYVEEVVIGRPVNFHGRGGEKSNQQAELILLQAAKRAGFRNIEFQFEPVAAGLEYESTLTENKVVLVVDIGGGTTDCSLIQMGPDWCGKSERSDSLLAHTGQRVGGNDLDINLTFKQLMHPFGLGSKFASGIDMPLTQFWNPIAINDVQAQKEFYSRQNLTALKSLHRDAQEPEKLARLLKVHHETLGYSLVRSAEEAKIALSNNSE

SEQ ID NO: 8002 - protein, 283 aa, Xenorhabdus sp.
MERIEHRASFGGWQDVYQHESSTLNCQMKFAVFLPPQIKDKKLPVLYWLSGLACTEQNFITKAGAQRYASEHGIVIVVPDTSPRGDDIPDDPAYDLGKGAGFYLNALKQPWAAHYQMYDYIVSELPELIEKQFNVNDIRAISGHSMGGHGALVIALRNSERYCSVSAFAPIVAPSQVPWGEKAFSAYLGEDRTLWKQYDTVELIKNGEVKEQLPLLIEQGTGDDFLNRELRPDLLLNACNEENYPITINFRQGYDHNYYFIASFIEEHIAYHARAMQKRAETQ

SEQ ID NO: 8003 - protein, 369 aa, Xenorhabdus sp.
MKSRAAVAFGPNRPLEIVEIDVAPPKAGEVLIKVSHTGVCHTDAFTLSGDDPEGLFPVVLGHEGAGVVIEVGEGVTSVKPGDHVIPLYTAECGQCDFCQSGKTNLCIAVRDTQGKGLMPDGTTRFSYNGQPVYHYMGCSTFSEYTVVAEVSLAKINPEANHEHVCLLGCGVTTGIGAVHNTAKVQPGDSVAVFGLGGIGLAVLQGARQAKAGRIIAIDTNPTKFELARQFGATDCINPNDHDKPIQQVILDMTKWGVDHTFECIGNVNVMRAALESAHRGWGQSVIIGVAGAGQEISTRPFQLVTGRTWKGTAFGGVKGRSQLPGMVEDAMKGEIELEPFVTHKMPLEDINEAFELMHEGKSIRTVIHY

SEQ ID NO: 8004 - protein, 42 aa, Xenorhabdus sp.
MRKKIEYILVESNEETRELRLDHIISFSNPEIGTIVVEHSSL

SEQ ID NO: 8005 - protein, 573 aa, Xenorhabdus sp.
MRTSQYLLSTLKETPADAEVVSHKLMLRAGMIRKLASGLYNWMPTGVRVLRKVENIVRDEMNNAGAVEVSMPVVQPADLWQESGRWVQYGAELLRFEDRGARPFVLGPTHEEVITDLVRNEVTSYKQLPLSLYQIQTKFRDEVRPRFGVMRSREFIMKDAYSFHTTQESLQETYDKMYDAYSKIFTRIGLDFRAVLADTGSIGGSASHEFQVLAASGEDDIVFSTESNYAANIELAEAVMPSAERAAPTEDMRVVDTPKAKTIAELVEQFNLPIEKTVKTLIVHAAEESEHKLVALLVRGDHELNEVKAEKLALVASPLQFATEEEIRAIVNAGPGSLGPVNLPMPVIIDRSVSVMSDFGAGANIDDKHYFGINWERDLPLPEIADIRNVVEGDASPDGQGTLLIKRGIEVGHIFQLGTKYSDALKATVQNEDGHNQVVTMGCYGIGVTRIVAAAIEQNHDDRGIIWPDAIAPFQVAILPMNMHKSYRVKEVAEKLYADLRSNGIDVILDDRKERPGVMFADMELMGVPHTVVIGDRNLDNDKVEYKYRRTGDKQMLKLEDVVDYLKNNIKQS

SEQ ID NO: 8006 - protein, 235 aa, Xenorhabdus sp.
MADFHFTQIGTIHSPYKEKFAIPRQPGLVEDGTGQLELLAPYNQADAIRGLEQFSHLWIVFVFHQTMNGGWNPLVRPPRLGGNAKMGVFATRSTFRPNPIGMSLVELKGIDYQNNRVLLQLGSLDLVDGTPVLDIKPYLPFAESRPDAKAGFAQEAPNTDMEVCFSSNAEHQLLCHQVSYPQLRRFICQILAQDPRPAYRKKEQENRIYAAHILDFNVRWLINGAITEVVSIELR

SEQ ID NO: 8007 - protein, 120 aa, Xenorhabdus sp.
DDENKRRKTLQQLNRGEGRHAVARNVFHGKRGELRQAYREGQEDLLDSLGLVLNMIVLWNTIYMDAAVQQLRQEGYPVHDEDVKRLSPLLCEHINMQGRYTFTVPEAVSRGELRPFNDNN

SEQ ID NO: 8008 - protein, 230 aa, Xenorhabdus sp.
VTRNKPPTKISDEALLTDVKNYPDNYQWERSKRLGVAQSAIHYALKRLKITVKKTLRHPNADAQARQAFVERLGHYEQAMKPIVYLDESGFSQSMPRTHGYSAKGLRCFGTHDWQAKGRINVIGAILKKTFVTLSLFSGNINADVFHAWMTQDLLPKPPSGAVIVMDNALFHKWHDTIKAIADHGCLLEWLPPYSPDLNPIEPKWAEVKAIRRRERCSIDELFMTHVKYV

SEQ ID NO: 8009 - protein, 251 aa, Xenorhabdus sp.
VDSLKVKYIERYIAGRKANNLSHRTLQNEMSVLRAILAQAGKHKLADPDNARLSNRALGIADTSRKGTKMALAPTAFRDIFQQVEQKDRRVAAVMQLAYVLGLRTKEAVEAYKSLATWKKALENGHTSVRVVFGTKGGRPRQTVILDRAALQHAIAYAEREQARRSGKLIDKPTITQAIDRYRYIVRSSGLTGKNAPHSMRYHFAQQSGEHYIAQGFSEREALALVSMDLGHGDGRGRYIRQVYYRNSDDE

SEQ ID NO: 8010 - protein, 134 aa, Xenorhabdus sp.
MCVMVTGIRCLITSGLEVAIITGRQAKLLEDRAKTLGITHLYQGQNDKVLAYQELLDKLALQPEQVAYIGDDLIDWPVMAKVGLSVAVADAHPLLLPKADYVTRIAGGRGAVRELCDLVLFAQNKLEDAKGLSI

SEQ ID NO: 8011 - protein, 182 aa, Xenorhabdus sp.
VLALIGWNLSNSNEDASSPVLDEGYPTYQTKEATTFVYDPEGKLVYKLEADDVKNYTETKLTWFTKPVLTTFDANSKSTPPPATWTVRANKAKLTHDNMLYLYGDVQVDSLNDASQLKRITTENATVNLVTQDVASDDKITLEGVGLRSVGMKMRGNLRDKTAELIEKVTTQYEIPHEEPNP

SEQ ID NO: 8012 - protein, 187 aa, Xenorhabdus sp.
MKNLIRNTFIASTLVAVSLPALALKDDTQKPITIDSARQSLDLTGNIATFTDNVIVKQGSIDIHADKVVVTRPDGDSKKTVIEAYGNPATFYQLQDDGKPIKGHASKMRYEMNNELITLTGNAYLEQLDSNIKGDKITYLVPTQQMEAFSDKGKHVTTVLLPSQLQEKGLGVNNTGTNSTEVHKKSK

SEQ ID NO: 8013 - protein, 241 aa, Xenorhabdus sp.
MAILNADNLAKSYKGRRVVEDVSLKVKSGEIVGLLGPNGAGKTTTFYMGVGIGPREAGTNTIGHEDISLLPLHERARRGIGYLPQEASIFRRLSVYDNLMAVLEIRKDINQQQRKERAEELMEEFHIAHLRNSLGQSLSGGERRRVEIARALAANPKFILLDEPFAGVDPISVLDIKKIIQHLRDYGLGVLITDHNVRETLDVCERAYIVSQGHLIAHGTPEDILNNEQVKRVYLGEGFRL

SEQ ID NO: 8014 - protein, 465 aa, Xenorhabdus sp.
MTPQLQQAIRLLQLSTLELQQEIQLALETNPLLEQEDTLQEIDAQDYSDTETTVMDTLEALEQKNMPEELPLDTSWDEIYSAGTSSGTRSDYSADDFPVYQGETTQTLQDYLTWQAELTPFTETDSAIATSIIDAIDETGYLTASVEDILISIGNDELTPEEIEAVLKRVQHFDPIGVAARDLRECLLIQLSLLPIETPYLNEARLVTSKYLELLGNRDFRNLLRQSKLKESALKEAIAIIQSLEPRPGLMVNTGESEYVIPDVLVQKENERWQVRLNTDSIPRLCINQHYAALGQQSQNESDSLFIRNNLQEAKWLIKSLESRNETLLKVSNCIVEWQQDFFEHGAEYMKPLVLADIAYQVDMHESTISRVTTQKYLHSPRGIFELKYFFSSHVNTDSGGEASSTAIRALVKKLVTAENPAKPLSDSKLTSLLAEQGIQVARRTVAKYRESLSIPPSNQRKKLV

SEQ ID NO: 8015 - protein, 95 aa, Xenorhabdus sp.
MQLNITGHNIEITDALRNIVNTKCGKLDQYFDKINLIQVILRVEKVQKIAEATVHVNGGELHASSEHEDMYAAIDALVDKLTRQLTKHKSKLRQH

SEQ ID NO: 8016 - protein, 97 aa, Xenorhabdus sp.
VGTTGIGNGIAIPHGKLETESSDNAVGVFLHLEQPITFDAIDNQPVDLLFALLVPSNQCQVHLHSLSLIAKRLSDKNFCRRLRSAQSDEELYKIITE

SEQ ID NO: 8017 - protein, 283 aa, Xenorhabdus sp.
MVLMIVSGRSGSGKSVALRALEDMGFYCVDNLPVVLLPELANTLAERDISAAVSIDVRNMPESPEIFEEALTKLPDSFSPQLLFLDADRNTLIRRYSDTRRLHPLSSKNLSLESAIDKESDLLEPLRSRADLIIDTSEMSVHELAEMLRTRLLGKRERELTMVFESFGFKHGIPIDADYVFDVRFLPNPHWDPKLRPMTGLDRPVAAFLDRHTEVHNFIYQTRSYLELWLPMLETNNRSYLTVAIGCTGGKHRSVYVAEQLADYFRSRGKNVQSRHRTLEKRK

SEQ ID NO: 8018 - protein, 39 aa, Xenorhabdus sp.
MLMLDSEQGSYIEVEATGVDEQQALSAIVALFNSGFDEE

SEQ ID NO: 8019 - protein, 385 aa, Xenorhabdus sp.
VLSLDNTQAVRVAVNNNAWVEINTTIFENNIQTLKETLNKDTKICAILKGDAYGYGLGLLMPSIIKTGVPCVGITSNEEARIVRDSGFTGQLVRVRAAMADEIESTLSYDMEEMVGDLESAKAIDAVAKKHGKEIRVHLALNTGLMSRNGLEMKTEQGKQEALQIAKLPNLKLVGIMSHHALTDLNVIRESIKNFNEQTAWLIKEANLKRDEITLHASSSFASLSLPEAQFDMARVGSALYGILQDSHPEFKPLIQVKTRVASVKPYPKGNGVSYDNTHILKRDSILANLPVGFSDGFSTALSNKAYVLINGHRAPVVGRVSMNTVMIDVTDLPEVKSGDEVVILGKQGNEEITQADIQKWSGMHIVELTSIFGETNPKITVTGL

SEQ ID NO: 8020 - protein, 136 aa, Xenorhabdus sp.
MKKPNIIINELDAERLDSLLEQAAFANTSIADALNDELDRAEILPPAEIPADIVTMNSEIKFIDFSNNEERIRTLVYPASLQDSTKQLSVMAPLGAALLGLRVNDEITWELPNGEKTRIKVLEILYQPEAAGEYHR

SEQ ID NO: 8021 - protein, 178 aa, Xenorhabdus sp.
MAKQPEDWLDNYPAEEEEEEIIWVSKSEIKRDAEELKKLGAELVELSKSELERIPLDEDLLAAIELAQRIKREGRRRQLQLIGKLLRARDPEPITIALDKLKNRHNQQVVILHKLEELRDKLLESDNALEEVVTLYPHTDRQQLRTLVRNAKKEKAASKPPKSYRQIFQYLKELSGTV

SEQ ID NO: 8022 - protein, 191 aa, Xenorhabdus sp.
MKKGQWQTELGDTVAEKTLGILGYGNIGQRVARYARAFDMKVQVWGSERSQEKARQDGLIVPQSREDFFKTSDVITLHQRLVKETTGNVTLTDLTHMKNSAVLVNTARSALIEAGALEKALDLGTPGFAALDVFDVEPIWNAGHALLKRDNVLCSPHIGYVTKSCYDIYFDNAFKNVERYFSGDESHVVNK

SEQ ID NO: 8023 - protein, 324 aa, Xenorhabdus sp.
MKALLLEQRDTLSASIQNIDTTQLPPGDVIVDIHWSTLNYKDALAITGKGKIIREFPMIPGIDFSGVVRHSEDPRFHIGQQVLLTGWGVGENRWGGLAEQARVSGEWLTPLPPGLSTRQAMIIGTAGFTAMLCIMALEQGGITPESGEIAVTGATGGVGSTAITLLSLLGYSVVAISSKPESQEYLLSLGAKEILPVSDFSQPARPLEKQRWSGVIDTVGGTILAKLLAQVSHNGTVAACGMASDINLPTTVMPFILRNVRLQGVESAIVSAADRPKIWERLQKLLPESFYQQTANEISLDQVIEHANKLVNNQSTGRTVVKIR

SEQ ID NO: 8024 - protein, 150 aa, Xenorhabdus sp.
MADKFRILLLNGPNLNLLGTREPETYGKLTLDDIVSKLSQEAHQSGIELFHLQSNAESELIERIHTARGNTDFILINPAAFTHTSVALRDALLAVDIPFIEIHLSNVHAREPFRHHSYLSDIAVGVICGLGADGYSFALQAAVNRLSKSN

SEQ ID NO: 8025 - protein, 152 aa, Xenorhabdus sp.
MDIRKIKKLIELVEESGISELEISEGEESVRISRTTAVQGMPITQQYISAPVQQPAPVAAPAPAAPAAPAAAEISGHTVRSPMVGTFYRSPSPDAKPFIEIGQHVNQGDTLCIVEAMKMMNQIEADKTGVVKAVLAQDGQPVEFDEPLVIIE

SEQ ID NO: 8026 - protein, 449 aa, Xenorhabdus sp.
MLEKIVIANRGEIALRILRACKELGIKTVAVHSAADRDLKHVLLADETVCIGPAASVKSYLNIPAIISAAEITCAQAIHPGYGFLSENADFAEQVERSGFTFIGPKAETIRLMGDKVSAISAMKKAGVPCVPGSDGPLGDDTEKNKSIAQRIGYPVIIKASGGGGGRGMRVVRSDKELEQSIAMTRAEAKAAFNNDMVYMEKFLENPRHVEIQVLADGQGNALYLAERDCSMQRRHQKVVEEAPAPGISAELRRSIGERCANACMEIGYRGAGTFEFLYENGEFYFIEMNTRIQVEHPVTEMITGVDLIKEQLRIASGMPLSIKQEDIVIKGHAIECRINAEDAKTFLPSPGKITHFHSPGGFGVRWESHIYAGYTVPPYYDSMIGKLITYGETREVAIARMKNALAELIIDGIKTNIDLQMSIMNDENFQKGGTNIHYLEKKLGLHDK

SEQ ID NO: 8027 - protein, 293 aa, Xenorhabdus sp.
MPWIQLRLNTTGQQAESLGDELVESGAVSVTFQDSHDTPIFEPLPGETRLWGDTDVIGLYDAETDMKAVVSQLEQVPQLGKGFLHKIEQLEDKDWEREWMDNFHPMRFGNRLWICPSWREVPEPDAVNVMLDPGLAFGTGTHPTTSLCLQWLDGLDLQGKTVIDFGCGSGILAIAALKLGAKHAIGIDIDPQAIQASRDNAERNGVSELLTLYLSKDQPDNLECDVAIANILAGPLRELAPVIGSLPKSGGLLGLSGVLASQAEGVAEAYSNEFIIDPIAEQEEWCRITGVKK

SEQ ID NO: 8028 - protein, 327 aa, Xenorhabdus sp.
MRIGQYQLKNCLIAAPMAGITDRPFRSLCYTMGAGMTVSEMLSSNPQVWKTDKSRLRMVHRDEPGVRSVQIAGSDPDEMAAAAKINVDNGAQIIDINMGCPAKKVNRKLAGSALLRYPELVQKILSAVVNAVDVPVTLKIRTGWSPEERNCVEIAQLAERCGIQALTIHGRTRSCLFNGEAEYDNIRTVKQTVAIPIIANGDITDPLKARAVLEYTGADALMIGRAAQGRPWIFREIQHYLETGELLSPMPLGEVQRLMNEHVRELHDFYGQGKGVRIARKHVSWYLKEHAPDDQFRRSFNAIEDASEQLEVLEAYFENFCVNKEKS

SEQ ID NO: 8029 - protein, 98 aa, Xenorhabdus sp.
MFEQRVNSDVLTVATVNSQDQVTQKPLRDSVKQALKNYFAQLNGQDVNDLYELVLAEVEQPLLDMVMQYTRGNQTRAALMMGINRGTLRKKLKKYGMN

SEQ ID NO: 8030 - protein, 202 aa, Xenorhabdus sp.
MVNGHAADYYKMRDELSELSKPEFDEILAGIQQSDMNAYDKQEIIWRYTMMYDNENDIQNIQYLAWDYVRFSMLCLNGCKLQYITEQEAKNWTLMLAPLLRMVYSGWDDLWYHFALTRWFWASTDEGWAECQSEYIGIIRALLNDPNSPTVAINWNSELPPIETHSFAQALTEVLTEQNPDAEVNFNEVHDAIREQVRADEP

SEQ ID NO: 8031 - protein, 101 aa, Xenorhabdus sp.
MEEDANLLVGQRIQQKRKELGITATALAKQIGISQQQLSRYERGTNRINITHLVAICLELETQISWFFEDCFEKESKEGIVNKLDTQYIPIAETIIGKNGC

SEQ ID NO: 8032 - protein, 192 aa, Xenorhabdus sp.
MTKKPQRSSLGQIRIIGGKWRGRKLPVPDSEGLRPTTDRVRETLFNWLMPVIQGADCLDCFSGSGALGFEALSRYANSATLIEYDRNVAKQLSNNLALLKADNGKVIQNNTLQHLNQAGTPFDIIFLDPPFRKGMLEETINLLETNGWLAKESWVYVEAESESAATAVPANWHLHREKIAGQVAYRLYIRRQ

SEQ ID NO: 8033 - protein, 97 aa, Xenorhabdus sp.
VVGIVVMLVIWSRLDQLRWRVLDTWVMVLIMVWVAGEQYFALGNESRLSAMVGAILLLFAHSISMISQYRFPFKLSKAIVASCRFIGHFLIIRSLII

SEQ ID NO: 8034 - protein, 780 aa, Xenorhabdus sp.
MFSISKKHKQLQRGSISSPKRALQGSSSLRNESKQSRTRDTKHQHSHDHAHSHHKSHSHDHHGGSCPHTHARPVQDTVPAELIARQRFNWMIQGMDCPSCAGKIENAVKRLDKVKQVKVLFATEKLVVDADSDIRADVVKAVKQAGFEIKETDSTSKLPPATSLWKTFSPILLLAVLMAASGVIAKMSAPAGKIAFIITVLIGLYPIAIKAIRLFRSGSFFAIETLMTVAAIGALFINATSEAAMVILLFKLGEILEGYAAGRARRGVSALMALVPEQALLVKGGIKKKVPAADLRPGDIIEIAPGARLPTDAELLNPFASFDESALTGESVPVERQQGEKVAAGCLSIDRSVQMQVVSEPGHNAIDRILQLIEEAEERRAPIERFIDKFSRIYMPLIILLSALVIVIPPLFFAEPWDMWIYRGLTLLLIGCPCALVISTPAAITSALAAATRRGALIKGGAALEQLGSITTIALDKTGTLTEGKPQVTNVEPVENISVETLLALAGSVESGSHHPLAKAILNEAENKGITVVEAENRKALAGIGIEGQLSGQKILVSAPGRLSENVLSPQWKQRVIELEDSGKTTVAIVQDGQFIGLIAMQDTLRQDAIEAIQSLKRQGVNAVMLTGDNPRAAAAIAGQLNIDYRAGLLPEDKVTAVMQLNEKHKTMMVGDGINDAPAMKASSIGVAMGSGTDVALETADAALTHNRLTGLAEIITLSRATHYNIRQNITIALGLKAIFLITSLLGITGLWMAVLADSGATALVTANAIRLLRIKNKGQ

SEQ ID NO: 8035 - protein, 441 aa, Xenorhabdus sp.
QIAEQRKQLEEAVSHALELAKAGCDAAEVAVNKTTGISVSTRFSEVENVEFNSDGALGITVYNQQRKGSASSTDLSPEAIARTVQAAIDIARYTSPDPCAGPADKELLAFEAPDLDLFHPADLDADKAIELAARAEQAALQADQRITNTEGGSFNAHYGIRVFGNSHGMLQSYCSSRYSTSSCVIAEQDGNMERDYAYTVNRRFDELQSPEWVGQESAQRTLSRLGARKLSTMKAPVIFSAEVATGLFGHLVGAISGSSIYRKSSFLLDSLGKQILPSWLTIEEQPHLLRALASTPFDSEGVRTLPREIIKDGVLQSWLMTSYSARKLGLTSTGHAGGIHNWRIEGQGLGFDGLLREMGTGLVVTELMGQGVSAITGDYSRGAAGFWVENGEIQYPVSEITIAGNLKDMWANMVTIGNDIEIRSNIQCGSVLLPEMSIAGQ

SEQ ID NO: 8036 - protein, 89 aa, Xenorhabdus sp.
MKKVEFDFNHIPDLTTFYNQFRERFDLSDHFGANLDALWDVVTSEIELPVDITFIHLDVQKKPHFAALVLLFEEAEEELEGELKFDVMN

SEQ ID NO: 8037 - protein, 52 aa, Xenorhabdus sp.
VIAEETTSLHIDVLTEQHRVASYLKQHHKLPDYYITKKQARRLGWEPRKGNL

SEQ ID NO: 8038 - protein, 481 aa, Xenorhabdus sp.
MSLTYVSEHLLTDNGLNHNDLFSVLGQLAERRLDYADLYFQSSYHETWVLEDRIIKDGSYNIDQGVGVRAVSGEKTGFAYADQITLNALQQSAQAARSIVREIGNGTAHTLGAVTHNVLYPAVDPLQSMSREEKIALLHHVDKIARAEDQRVQEVNASLSGVYEQVLVAATDGTLAADIRPLVRLSVSVLVEEDGKRERGSSGGGARYGYEYFLQDTDGQTLAEQFAREAVRMALVNLSAVAAPAGAMPVVLGAGWPGVLLHEAVGHGLEGDFNRRGTSVFSGQIGQKVASELCTVVDDGTIEGRRGSLSIDDEGVPGQYNVLIENGILKGYMQDKLNARLMGVAPTGNGRRESYAHLPMPRMTNTYMLAGNSTPEEIIASVDRGLYAPNFGGGQVDITSGKFVFSTSEAYLIENGRITKPVKGATLIGSGIEAMQQISMVGNDLALDKGVGVCGKEGQSVPVGVGQPTLKLDNLTVGGTA

SEQ ID NO: 8039 - protein, 286 aa, Xenorhabdus sp.
MRNVNVALLQLCSGTNIKHNLAQIEQQIKQLPKTVKLVLTPENALLFADADAYREHAEEQGTGPLQQAVRELAQHYGIWLLIGSMPMISREDPSRITSSSLLFDDQGEIRARYDKIHMFDVNIKDEHGSYNESSIYQRGEHITVVDTPVGRLGMAICYDLRFPGLFQALREQGAELISVPAAFTRLTGKAHWEPLLRARAIENQCIILAPAQVGVHGTRRTWGHSMAVSGWGEIIKKNPLSVCALQLNIRRDSLTHMREQIRVVKHNRFRPQLTSLIKKNTNLDKE

SEQ ID NO: 8040 - protein, 1164 aa, Xenorhabdus sp.
VDYDKPLFDGESEQQLPKPDKLSSLFLERFNYFELHDSSLTFPTPSGEKVRLLLPQLAWLNKDNRHRAEGHINLSSINGQEGVVQIKFDLKDINHVLDSGTIYLQADDIDMRLWLSRWLKDNTGLENARFSLANWITLKNGRIENGHLQLRRGYVNWHVGEKKHQLTVHDLLLQMRRQGEGWLFDIPNLESLNTNGQQWLAGRLAALYIAKANKYQNKDHWRIRAENIQLERLSGMLPLMSPVTPEIVNDWQHRQPKGLIHRFALDVTPELADSTDIAVKWQDVSWSRWKELPSVNDFSGTLAGNKQQGNFIFELKNSLIDYRQMFQAPFDIASGAGKIEWKSDQEGLKIWSQGLDLQAKSLWINGDFNYTELRNKPPKLEMLAGIRVEDAGEAWRYFPQTLMGKSLTDYLTTALIKGKVDNATLIFQGNPHDFPFRHNNGQFQVWVPLRNATFKYQPDWPALFDLNADLNFRNNGLWIQADKAKLGKVDGSRISAVIADYNKEKLLIDADISGDGKDIHDYFHHSSLSDTVGSALDNLQLSGKVDGNLHLDIHLEDGTTDASGEVMLKDTELFIQPLNSRMKHLSGKFRFDNGNLQSDSLSTNWLGNPLSLRFTTQHSGQHYQVNVDLNAGWPVATLPELPAEIRRQLSGRLDWQGKVNITIPSKGEGLQHELSQQGAKYQVAINADLSHINSTLDGLETASLQKWNDLNIQAEGDDNQLRLTGSLGNRYKFNSQWSLEKGYTRLQRGILNTDKNGIPALPEKSMLELNLPDIEGDKWLALLGTLETKSGTGVAFSWPELFEITIPSLNIGGQRWHNLILSASKQSDSLHINAIGEEIDGDLWVYSDRIWQGAFNYLYYNPVFPGSAANDGNSLASSAADTPKYDFRHWPTLNVRCNECWLAGSKIGKISGTVKPEGNTLVLTDGRVENSAGKLTLSGHWSESNEGNYTRAKGQISGGSLDDMAAYLGFIIPITGAPFKFDFDLNWKDTPWQPDIKTLNGRLTGTLGKGTIAKLGAGRAGQLLRLVSFDALLRKLQLDFSDTFSDDFNFDSMRGDAQLKNGVMYTDNFHIDGLEADIDAKGQINFIQRQLNMELVITPEISATVGVATAFAINPMAGAAVFAAAKVLGPLWSKISVIRYRLTGSLEQPKIDEVLRQLKENKGS

SEQ ID NO: 8041 - protein, 143 aa, Xenorhabdus sp.
MVLQSMPWPEQVDVFRPTLPVLCLIYWLLAIPHRISVGTGFILGILIDLLQGSILGAHALAFSLVSFLVAFKFQLIRNMALWQQSLVVMILSTLINLCVFLTHALILQTIFHSEVFWNGVVNGILWPWLFLLMRKIRRQFSVR

SEQ ID NO: 8042 - protein, 356 aa, Xenorhabdus sp.
PSLQDYPFVMLKKFRGMFSNDLSIDLGTANTLIYVKGQGIVLDQPSVVAIRQDRAGSPKSVAAVGLEAKQMLGRTPGNIAAIRPMKDGVIADFYVTEKMLQHFIKQVHNNSFMRPSPRVLVCVPVGATQVERRAIRESAQSAGAREVFLIEEPMAAAIGAGLPVSEATGSMVVDIGGGTTEVAVISLNGVVYSSSVRIGGDRFDEAVINYVRRNYGSLIGEATAERIKHEIGSAYPTDEVREIEVRGRNLAEGVPRSFTLNSNEILEALQEPLTGIVSAVMVALEQCPPELASDISERGMVLTGGGALLRNLDRLLMEETGIPVIVAEDPLTCVARGGGKALEMIDMHGGDLFSED

SEQ ID NO: 8043 - protein, 72 aa, Xenorhabdus sp.
VTPDLIRWADIICVMEQKHKNRLKAVFSRLLKSKPIHVLDIPDDYLYMDPQLIKILEDVVPVYIAKNHYLTL

SEQ ID NO: 8044 - protein, 385 aa, Xenorhabdus sp.
MKIVIAPDSFKESLSAMQVAEAIEQGFREIIPQADYIKLPMADGGEGTVESMVAATGGKRFTCTVTDPLGQPVEAFWGLLGDGKTAVIEMAAASGLHLVPLAQRNPLITTSYGTGELILAALDHGVEKLILGIGGSATNDGGAGMMQALGANLTDGDNRPLPFGGVALTRLESINLTNLDPRLSQLEITVACDVTNPLCGESGASAVFGPQKGATPEMINILDSALLHYGMKIKTVTGIDVLDAAGAGAAGGMGASLLGCLNARLQSGVEIVLDTLKLEKAIQGADLVITGEGHMDSQTIYGKTPIGVARIANKFGIPVIALVGGMSKDYNVVHQHGLTAVFSIIPEVCTLADALADSTDNLHVLARNIASVWYIARAHKKEGGD

SEQ ID NO: 8045 - protein, 424 aa, Xenorhabdus sp.
MTTVSAIGAIGAIAALFVSIFLILRKVSPVYGMMAGALFGGLIGGADLIQTVNLMVTGAQGMTNAVLRILAAGVLAGVLIESGATSTIAETIVRKAGGKRVLLALAIATMLLTAVGVFIDVAIITVAPIALAIAHRADLSKMSILLAMIGGGKAGNVMSPNPNTIAASEAFHVPLTSLMVAGILPGLFGLVMAYYLSGRVITRGYKVRSEELTMTAQESLPSFMAAISAPAIAIFLLALRPVADITIDPLIALPVGGLAGAIIMGHWRQSNRFILSGLSRMSPIAIMLLGTGTLVGIIANSELKEILIHGITASGLPAYLLAPVSGALMSMTTASTTAGTAVASAVFAPTLLDLGISALAGAAMLHAGAIVLDQLPHGSFFHATGGSVYMQLHERLKLLPYETLVGLTIAFISTLIFGVFGFAG

SEQ ID NO: 8046 - protein, 284 aa, Xenorhabdus sp.
MTKEMQTLALVPQGSLEGYIRASNAYPMLSAEEEKELAERLHYQGDLDAAKQLILSHLRFVVHVARSYAGYGLPQADLIQEGNIGLMKAVRRFNPEVGVRLVSFAVHWIKAEIHEYVLRNWRIVKVATTKAQRKLFFNLRKAKQRLGWFSQDEVDLVAKELGVTSKDVLEMESRMSAQDMAFDMPSDDDSHDNPPAPVLYLQDKASDFADGIEEDNWENHAADKLTVAMEKLDERSQDIIRSRWLDDDNKSTLQELADKYGVSAERVRQLEKNAMKKLRMAIEA

SEQ ID NO: 8047 - protein, 317 aa, Xenorhabdus sp.
KKTVSPKSRSKSLKGGWRVQSRYAWKSTLSDMLFQPLATLLTIMVIAISLTLPSVFYIVWKNVNQAVEQWYPVPQLTVYLDKSLNDVSSNQLIEELKAMDGVKSVNYLSREEAVNEFRAWSGFASALDMLEENPLPAVAIVSPKLDFQNSQALTTLRDRVAQLKGIEEVRMDDGWFARLTALADLIGRIAAVIGGLMVVALLLVIGNSVRLSIFSRRETINVMKLIGATDGFILRPFLNGGALLGILGAILSLLLSYLLVWKLSSVVTEVASVFGTTFKLYGLGWDESLLLVLISGMIGWIAAWFATVQHLRRFRPE

SEQ ID NO: 8048 - protein, 221 aa, Xenorhabdus sp.
MIRFEQVSKAYLGGRQALQGVDFHLRPGEMAFLTGHSGAGKSTLLKLICGIERPSAGYIWFGGHDVSRLKTREIPFLRRQIGMIFQDHHLLLDRTVFDNVAMPLIISGASTEDIRRRVSAALDKVGLLDKAKNFPIQLSGGEQQRVGIARAVVNKPTVLLADEPTGNLDGELSEGIMRLFEQFNRVGTTVLMATHDTALIERRNYRILTLNQGRMQGEHHG

SEQ ID NO: 8049 - protein, 315 aa, Xenorhabdus sp.
LPKEQERPTKEGFFARLKKSLVKTRQNLGAGFLGLFRGKKIDDDLFEELEEQLLIADVGVETTRKIISNLTTHASRKELKDAEALYVKLKEEMSGILAKVDKPLEVGGKSPYVILMVGVNGVGKTTTIGKLARQYQSQGKTVMLAAGDTFRAAAVEQLQVWGERNKIPVVAQHTGADPASVIFDAIQSAKAKGVNVLIADTAGRLQNKAHLMEELKKIVRVMKKLDEEAPHEIMLTLDASTGQNAVSQAKLFHEAVGLTGISLTKLDGTAKGGVIFAIADQFEIPIRYIGVGEGIEDLRPFKADDFIEALFTRED

SEQ ID NO: 8050 - protein, 56 aa, Xenorhabdus sp.
VREYAGNFRHDDHANGFYDGSGHDHGSVDALYHVYVIAYFHFLGWKNPARPFLGTR

SEQ ID NO: 8051 - protein, 133 aa, Xenorhabdus sp.
MQSEKELIAHRSLIELPQWIEEVFTGREGHPSAMKKLLGSFPTDFRMITMKGQSIGLTEVENLFRHNIGTRPQLRIVIDACETLAETTESVICRYRETQHNTGTTLVRWSTVIIDIHAGQPYWRYLHETAIEE

SEQ ID NO: 8052 - protein, 324 aa, Xenorhabdus sp.
MMMSLEMVTAYRKSNALFSFVDSEAPLHLSTQDGKTVEQLAQLCNVYQDRFHRLLDYMQTLNVLIKKEDKFYLTEQWASLSKPDSFETLYIKFELDPAFWSTWAQYSSSLRKNNNKSAFEITHNESFFDYLSDEKNKKIKITFDNLMAKMTNMMNEYVIDRLPLNNTSSFIDIGGGVGSFAKNIKRHYPHIQCYVMDQYDFTEQESEGVTLINGNFFSAIPSGYDVYCMKGVLHDWPDNQVIHLLKNCHQAMREDSVLYVIDMIKEPDETASFDLYIDTLLLGRKRNQSEFEFVAKQAGFSITNIYNLNFSTVNGSQYIIEMKK

SEQ ID NO: 8053 - protein, 318 aa, Xenorhabdus sp.
VGQKMQQYPICNIRILSDTIREFTLEAPEWELAALTPGSHFRWLMPDNIGTRSYSCVMLTIPTATLTFAIQLNTASASSQYLQSLKVGDSARLEGPFNHFPQLSAPEGGRDIVIAGGIGITPIIGIIARLIAMGKHPECHYLISSQAQAVYATELATLAASHFYLHSTEEQKVCLSGLLGALQACDRLHVCGPVRLLNAVLDYCDNHHFPRQHIAFELFTTPTIKADIAETGYEVEAAESGIRLQVAAGQSLLDALETAGLEPLYDCRRGECGLCALKVIEGDVEHHDFIMTPQEATTSRTIYPCVSRAKGSFLKLAL

SEQ ID NO: 8054 - protein, 400 aa, Xenorhabdus sp.
MQSWLYLCHGSQIPTIGDYFTTELASQPLVAIRQKNNEIKVLYNRCPHKGVKILPETSGNSGRFLRCPYHAWTFKPSGELLSIPVKTEYDPGVLSECEASIGMKAVDNVVCYRDFIFVRLSDQGLPFDIFFGDALSTLDNMIDRSPKGALRVIGVPLRHRHHCNWKMVIDNQTDTCHPMVAHESSAGEAINLWAQADQQGAQPTAVELLAPLMSPHTFFSEMGIRIWANGHGHTGVSNSIHKDYSEIPDYWESMVESYGEKRAQQILNDTRHNTVYFPNLVVKGPIQTLRIIRPVSSSETVVESWILELVGAPQKMLERTIQYNNLINSPCSIVAHDDVEMYERATEGLKSQANEWVNIARLYDPAERWDRTTQMSGTSEGAMRNFYSMWQRMMEGGNGE

SEQ ID NO: 8055 - protein, 160 aa, Xenorhabdus sp.
MENNNVIQTLTDLIYHEAWLLDEQKFDDWFALLAEEYTWWIPSRHDQLSPLTESSLLYEDRFVTQLRINRLRNARNFSQQPRSRSQHLLQRPIISWTEGEQSASGVSQLLYSESRGDREWHYAARLEHQFHWREGQWLISGRKTVLLNLARPFASLQLII

SEQ ID NO: 8056 - protein, 163 aa, Xenorhabdus sp.
MTTNDISSAQTPSFPFIDTLFDYAAFLEQVESQQAIGHLPDCQQHQHIAIVGAGLSGLVAAQELLRAGVRNITLFEAEPGRYGGRLLSTRFNPDIPQYIAEMGAMRFPPTCVGLFLLTREKFWLKEKLPHTILTDTLAKGVYHKNQQNAGSESSMVFVILTVV

SEQ ID NO: 8057 - protein, 376 aa, Xenorhabdus sp.
MQNLTHVKALCALADPYRACADHDALFNDAMRELTLYHCEHTPGYEQWLANNGLNKQSVMAMDDWSALPPLFANYFKRNLIVSNSSVDALELTSSGTTGQKSRMHYDNRSITAAQNMVDRIFNYYGWNTPDQPCNYLLLSYEPAGAISLGTAYTDQFLCKYAPVNRSYYALRHNGKSNEFDPFGTIKALQEFAEEGLPVRIFGFPAFLWFTLQRMEQMGLPPLKLHPDSLLSLGGGWKTHSDKAISKQELYQRLEKQLGIPNVRCRDGYGSVEHPVPYMECSHHRFHVPVYSRVYIRHTANMSRQPYGEPGFLHFVSPFITSSPAHSIVMSDLAVLHPGSQCGCELDTDWFELLGRAGTSKSRSCAIAASELIKEA

SEQ ID NO: 8058 - protein, 684 aa, Xenorhabdus sp.
MAVLESLLVGNINWLRPSSSDKGFSEQLLHAFLAHDISGDLADRVAVLLLPATQLGTLLSQADAVSAWGGDSALSSIRSQLPAGCRWIDWGHRISFAWLNPDVVNDAQLDALADDICCYDQQACSSPQCLLVDSDDPAVLQNIGQRMAAALERRSGLHPALQADVQESAEITTQMAFQHLDFAFAPVNGKLWQNDGWRVVWRHEQELAASPLFRSLQLRPAPRQKLCSILRPWRNHLQSCALITRQEDIAEMSHALFAAGVSRIASAGQMHNGYSGEPHDGVYALSRLAKRVSVSLPAGTLDGCAHLNTPPSRPYGLDNLPVMNKADFQALTPNEKGRLYFRSGGSSGAPKLAAYSYSDYHTQMQSAADGIFACGLEPATDRVMNLLYGGKLYGGMMSFFTILDKLDVAQYPMGGPTDSDFSEIADLIIQERINTLVGMPSTIHRLFLSEADKLRQYGGVRKLFLGGEHLNVGQRNFLNEFGITLIRSAAYGSVDAGPLGHGCTASEDGVFHLMADTQWLEILNIHDDKPVAEGETGRLIFTSRHREAQSVQRYDLGDLGHWITEPCSCGLITPRFRLVGRNGALLRVGSIFINLAELSEQLETPVQWIIDHNEEGIGGIQLLIENPDVATVRQYLLDLEQNSKIKEVIDGGMLNLDVTFCPVSEFRRNAHSGKAPLFIDLRKS

SEQ ID NO: 8059 - protein, 413 aa, Xenorhabdus sp.
MKSIALIDLFNHVRKHSVYYRELYKSVPDNWTLQDLPLVEPGNYWVGSENLQTWPVLTAPLEGGHVFKTGGSTSDGRLSVFSQQEWKAFIQSFGKAVARQLQPGDRVANLFFAGDLYTSLLFIHGALSNSSLPIVEFPFTCKVDDNLLAHNIQHHNINVLAGVPVQLIRFAQYLKENGQTLPMVETILFGGESLFEGQIAAMRQVFPQARFGSVGCASVDGGLIGFADPECGPGEHRVFSEETIIEIIDEVTHEPITEPGHRGMLVVTNLQRQLMPVLRYPTGDLAYWCEPEQTHRKFALQGRANQGYRIRVGDLSLFPDDLATQLSPQTELLAWQLVLSQEESEDKIKLLVASPEPINIEKIRHNMLLAFPGLNTAHFRQNMLEIVQTNIDAMYTHPRSGKLQRVVDLRSYN

SEQ ID NO: 8060 - protein, 201 aa, Xenorhabdus sp.
MKSQYLAQNLGFYSTALMLDYVDSPFGLPEPESIVQGILPLKSFPLPKLNWPQSWQNWANQISQYIGESSPDQQQRGCSPFTSGAYATSQIKGRRLEITLYEADTDFLSEIIDYPANQLIYLKLPASEEALQFYPQLQRGGFRFAGLCPDPQEGWFLLWLRGYQPTLYQFSDISIQHLYQMELGETAGHSRQPCVSELIPG

SEQ ID NO: 8061 - protein, 231 aa, Xenorhabdus sp.
MIYLRKASERGHANHGWLDSWHTFSFAHYYDANFMGFSTLRVINEDLIDGGQGFGMHPHRDMEILTYVLSGTVEHQDNMGNLGQISAGEFQIMSAGTGIRHSEYNPHHDNPLHLYQIWIMPAENNLTPRYEQRRFEPEKNHQLILSPDARDGSLKIFQDMTLWRHTLKRSERYEYHIEKPRKIWLQVVRGEIDVNGVKAGISDGIAIRDESDIQITANQQSEILLFDLPPN

SEQ ID NO: 8062 - protein, 101 aa, Xenorhabdus sp.; identical to SEQ ID NO: 6521

SEQ ID NO: 8063 - protein, 143 aa, Xenorhabdus sp.
MQIRAKQGGCDIGEAVITGAGNLPAKYMLHTVGPCWNGGSGNEPELLKKAYVSCFDLIEQYNIETVSFPNISTGIYRFPKKLAAEIALEVIHSRLFDNQNILQVNLIWIDDETYIIYRSLNYTATCIKLLFGSQSIFTQRKLS

SEQ ID NO: 8064 - protein, 664 aa, Xenorhabdus sp.
MTTRKTLANAIRFLSMDAVQKAKSGHPGAPMGMADIAEVLWRDYLNHNPVNPHWADRDRFVLSNGHGSMLIYSLLHLTGYDVSIDDLKNFRQLHSKTPGHPEYGYTAGVETTTGPLGQGIANAVGFAIAERTLAAQFNRPGHDIVDHHTYVFMGDGCMMEGISHEVCSLAGTLKLGKLIAFYDDNGISIDGEVEGWFTDDTAARFEAYGWHVIRGVDGHDSDAITAAIEEARKETGKPSLLMCKTVIGFGSPNKAGKEECHGAPLGDAEIEATRKALGWEHPAFEIPQDIYAGWDAKEAGKAKESAWDAKFAAYAEAYPELAAEFSRRTSGELPENWEAESKAFIENLQQNPASIASRKASQNALEAFGKVLPEFMGGSADLAPSNLTMWSGSKPLNEVQDGNYIHYGVREFGMSAIMNGIALHGGFVPYGATFLMFVEYARNAVRMAALMKIRSIFVYTHDSIGLGEDGPTHQPVEQIASLRVTPNMSTWRPCDQVESAVAWKYAIERKDGPTSLIFSRQNLAQQERTAEQLANIEKGAYVLKDCAGQPELILIATGSEVELAVKAADQLSAEGRKIRVVSMPSTDAFDKQDAAYREAVLPAAVSARVVVEAGIADYWFKYVGINGAIVGMNSFGESAPADALFKEFGFTVENVVAKAAALLK

SEQ ID NO: 8065 - protein, 344 aa, Xenorhabdus sp.
MTIRVAINGFGRIGRSVLRALYESGRRAEIEVIAINELADAEGVAHLLKYDSSHGRFAWNVRLNKIGLNNTVLHVGDDSIRLFHQPDISDLPWKELGIDIVLDCTGKYGERIDGEAHLASGAKKVLFAHPGGNDLDATVVYGVNHELLSAEDCIVSNASCTTNCIIPIIKVLDDAFNIESGTVTTIHASMNDQPVIDAYHSDLRRTRAASQSIIPVDTKLAAGITRIFPKFSNRFEAISVRVPTINVTAIDLSVTVSAAVNVSEVNQLLQKSAVSSFRGIVDFTDLPLVSTDFNHDPHSAIVDGTQTRVSGNHLIKTLVWCDNEWGFANRMLDTTLAMASKGFK

SEQ ID NO: 8066 - protein, 388 aa, Xenorhabdus sp.
MSVIKMTDLDLAGKRVLIRADLNVPVKDGKVTSDARIRASLPTIEAALSQGAKVMVTSHLGRPTEGEYNEEFSLQPVVDYLKAALSSPVRLEKNYLNGVEVAEGELVVLENVRFNKGEKKDDETLSKQYAALCDVYVMDAFGTAHRAQASTHGVAKFAPIACAGPLLSGELEALGKALHNPARPMVAIVGGSKVSTKLTVLDSLSKIADQLIVGGGIANTFVAAEGHNVGRSLYEDDLIPEAKKLLECCDIPVPTDVRVATEFSETAEATLKSTSEIKDEEQILDLGDASAERLAEILQGAKTILWNGPVGVFEFPNFRKGTEIIARAIAESDAFSIAGGGDTLAAIDLFEIADKISYISTGGGAFLEFVEGKKLPAVVMLEERANSN

SEQ ID NO: 8067 - protein, 376 aa, Xenorhabdus sp.
VIAGSIYCLLNVNTGPRNMSKIFDFVKPGVITGDDVQKVFAIAKEHNFALPAVNCVGTDSINAVLETAAKVRAPVIIQFSNGGAAFVAGKGLKAEGQQAAILGAISGAYHVHQMAEHYGVPVILHTDHCARKLLPWIDGLLEAGEKHYAQTGKPLFSSHMIDLSEESLEENIEICSQYLARMAKIDMTLEIELGCTGGEEDGVDNSHLDSSSLYTQPEDVAYAYEKLNAISPRFTIAASFGNVHGVYKPGNVKLTPKILRNSQDYVSEKFNLPHNSLDFVFHGGSGSTAEEIQEAVSYGVVKMNIDTDTQWATWEGILNYYKKNEGYLQGQLGNPEGADKPNKKFYDPRVWLRAGQVSMEVRLEQAFKELNAVDVL

SEQ ID NO: 8068 - protein, 148 aa, Xenorhabdus sp.
MHESLTLALLQARETSMGFFRPILKSYNLTEQQWRIVRVLASSRSIDFHDLANLTCILRPSLTGILTRMERDGLIFRLKPMNDQRKLYVSLTPAGQELYEQAKGEVDEGYKAIEAAFSPEKLAQLLELLDDLISIGNHSQTDIDENEE

SEQ ID NO: 8069 - protein, 60 aa, Xenorhabdus sp.
VGELTRGLEVVEFACGIPHLQKGEHSANVGAGVDSHSLMQPLGVCAGITPFNFPAMVAMW

SEQ ID NO: 8070 - protein, 50 aa, Xenorhabdus sp.
VADRWLDIAFVHRNLREEISVDIAAEFLNTLGDFDNAAKREFFEQLDELF

SEQ ID NO: 8071 - protein, 173 aa, Xenorhabdus sp.
MREASVLDWLADRLNVAEVVCVAENSGGEFMISRAVPGKPLYERLNARQPVLELFHEAVRQMQSVPIVDCPFDSGAGFRLNELEYFLNHGLCAEQYDLNQWQGITTPQSLLKHLPLYPVRSECFLTVISVTAISSLMNMTICILLILGGEVWLIAGWISHLCTVTCVKRFQWI

SEQ ID NO: 8072 - protein, 539 aa, Xenorhabdus sp.
MSVTGVTAQELAVYGIRDISEVIYNPGYELLFSEETKSSLQGYEKGTLTNLGAVAVDTGIFTGRSPKDKYIVRDEVTRDTVWWADQGKGKNDNKPLSQETWSHLKGLVTQQLSGKRLFVVDAFCGANADTRLKVRFITEVAWQAHFVKNMFIRPSDEELIDFTPDFIVMNGAKCTNPQWKEQGLNSENFVAFNLTERMQLIGGTWYGGEMKKGMFSMMNYLLPLKGIASMHCSANVGEQGDVAVFFGLSGTGKTTLSTDPKRKLIGDDEHGWDDDGVFNFEGGCYAKTINLSKEAEPDIYHAIRRDALLENVTVLADGSVDFNDGSKTENTRVSYPIYHIENIVKPVSKAGHATKVIFLTADAFGVLPPVSRLTPEQTQYHFLSGFTAKLAGTERGVTEPTPTFSACFGAAFLSLHPTQYAEVLVKRMQASGAKAYLVNTGWNGTGKRISIKDTRAIIDAILSGDIEDADTVELPIFDLTVPTTLPGVDSGILDPRNTYADKSEWDVKAKDLAERFINNFDKYTDTAAGAALVKAGPKL

SEQ ID NO: 8073 - protein, 63 aa, Xenorhabdus sp.
MIFDKHANLKYKFGNRKFWSEGYYVSTVGLNEATIRKYIREQEKSDLLQDKLSTREYNDPFKG

SEQ ID NO: 8074 - protein, 68 aa, Xenorhabdus sp.
MPFVNIKITREGATAEQKKQLIEGATQLLVDVLGKNPATTFVIIDEVETDNWGVGGKSVTEVRAAAKK

SEQ ID NO: 8075 - protein, 305 aa, Xenorhabdus sp.
PLQKGLNGGKKALSVTIRLGNYIRHIPFIAHLIRAAQRFNDRMGSQFGAAITYFSFLSLIPILMLSFAIAGFVLASNPDLLTRLINGIANSINDPSLANTLKNSVDTAIRQRTTVGLTGLAIALYSGVNWVGNLREAIRAQSRDVWERTHEDKEKIYFQYIRDVFSLFGLLFALVITLSLNSIAGSAQASIVHALGLENIEWLRPAWTSIGMFISISANYLLFLWILWILPRHQPERKALFQGTLMAAIGFEIIKSIMTMMLPRLASSPSGAAFGSVIGLMAFFYFFARLTLFCAAWIATAEKKE

SEQ ID NO: 8076 - protein, 151 aa, Xenorhabdus sp.
VGDANGADSSIQKLLLEMGSHQTTVFSSSNTPRNNLGSWPVRVIDSAYAKGTRAFFTAKDLKMAEEADYGLMVWDAKSTGTLSNVIELLLQNKFSAVFINKAKKFEVIKKTKDLETLIAYMSPIALEKAEQKIKLRYKLASLNNSQYQMPL

SEQ ID NO: 8077 - protein, 126 aa, Xenorhabdus sp.
VEEIVKPYFPKIGFVIPMPASNIRKVQPVSELAKQVARLINSPFFDGILLKATGGTSLKNLSNKEEKEEAIGNSFSIEDTIKNEGKWNVLLVDDLFHTGATMEAACNALSSYSKVKSIYVATLTWR

SEQ ID NO: 8078 - protein, 47 aa, Xenorhabdus sp.
MMKVSLRKIIGNWTLGYALDKHTVGSTFLGYNGAGHPIFDTVRTEIG

SEQ ID NO: 8079 - protein, 1471 aa, Xenorhabdus sp.
MKRKIFRLSPTGKLAASMAIILATCSTSFASGITPGGDAAHRPDVSIAETGATVINIVSPSESGLSHNQYQDFNVNQMGAVLNNSLVNGQSELAGQLSANSNLNGQAASVILNEVISRNPSLLLGKQEVFGMAADYILANPNGITCNGCGFINTNQASLVVGNPLVENGILQGFNNFNNKNALNIRNSGLTHNDVLNLIAPRIDIRGKVITPKALNITTGNNQIAADGRILDSKQPEAGALDSYYFGSMQAGRIRLVNTAEGSGVNLRSKMQAGDDIYIASHGDVELEAANLQGGDITLQGKNLRAQGHLNRSSLQKTGEGNHQSTFSGAHTSQEQINESVARTQLTGKNITLIARKDNQIMATDIDGDNIKLTGANLKLDGQQLHQRDQNTDNNWQLSWQKDVTNESEKYQYEGNTLNARNNVHLTASEGNAEILGSKVTAGNQISVSAKQDVKLAGLVESERKLEKGYRKNDGMGLQTGDWATIDTTQRLVSSELNAGGDLGINAGANAEITGSKVHSGKNMIVSAGQQTKVTVQSLVDEHATEKNKRKWGGLAGGSNKDNHDKVETHHASDLSADGHLLLSAIDGVTITGSKVKARQGAYVEANDGDLTIDNSVSNTYKKVDERKGTIFNITKNSNQEQTNQQTSTGSQLISDADLKLISDKDINVIGSLAKSAGELNINTSGNINVLAYGEKTEHQQEKNNLDWQYYAHDTKDKQYRAGAGFEHTLDNQKTHTTTQQQAELNGRTITINSGKNVTIDSGRVVTTQGDARIAGNNIALTAAENSSSSSNSQAKVRGGVFATGGMDKFGGGAEGGYSDNGHSRNRTTAVVSEARINGNLELNAQGELKQQGTQYQVQGTYQANAGSIRNVATANTESDSTRQMQVGGEISGSADYSATTRPMEKTAKAATNGKLDTSIAKTGLPNIGLELEMNGKSHYSSNHQSNAVVTTVKAGDIRINTNGDLYDQGTKYQANKGNASLTAGSHTSEAAYNQQSSSSSNTVGDARMRVYTSTGSDLSVNGKGSGSYQAESTHNRNAVGSEINAQNGINVQVTRNAHYQGTSMNGGNGQTNVNAGGNIQFEQATNREEKNSYGYNGELSLTVGTNPDGKNFSGSAGAGYNTSQQNRNIAQTGTITGGQNVNLNAANNLTLQGTNVSGKQVDLTAQRGRIELASAHDAVNNNGWNFGAKGKGSMANTVRNNEGGDGNAGNGEAGNRIIDNKYNIGGEVKFGVDRLNKVTYHNNQVSGGNVTLTSARNTSLKGSNINADQVTGNIGGNLNVESLKNKTDSLNIGLDSRLGYSRTVKGDSSHKATLPIADNNSPEIAATNDDKTNTEAPSLTDRLTAAFKNYNGKLKSNYNTLDQETVGEQSTLNGANGVNLNVAGRTYLTGSRIDSTQGTVSMNTQQIAHQSITGHDRGKNMGVNLPDSIADFTAAAQKDVFSGKIPFVKNESHNTETPITHSGIKGHQLD

SEQ ID NO: 8080 - protein, 555 aa, Xenorhabdus sp.
KRTAVFILLSVSLQASALPEAPDAVLPVDEARRTLQDSSREIDQLIEQRRYRGFIERSDTLSPQTVSPVLTETPACLDISGVYLQGITLLSLTELDTLSALPERCITSNAINRLTAEITNLYIAKGYITARVQFIPPNYNRELGLSVIEGFVEAIEGGDRWVNSRMLFPGLINQPLNLNQLDQGLDQSNRLQSNKTTLDILPGTVNGGSIVRLHNRHSTPWHLSAITDNYGQKSTGKWISRLNASFDSPLGLSDFVSVNGVSTIDKPRTQYNRAATLFYSLPYGAVTFSGFTSYSQYKNQLKLQHNSLKLSGNSQQSGMRIDWLFHRNQSQISTLNTQFVYKDSNTYFDESKSNVSSQKLAVLSLGISHLQIIPNGLITFDTGIEQGTPWLSAQTATHNLNTRFTKGKLSVNLHQNFKLFTVPYRLNSQFYTQYSPNGLPGVEWLNITDRNAVRGFSKNTLSADNGWYLRNTLSYAIPLPESSLTLRVGADVGQVKSHNRQEASWRSNAGFSVGAALRHQHFLADIEVSRGKTLSHQDRNKSEPIQLLTRFSYLF

SEQ ID NO: 8081 - protein, 131 aa, Xenorhabdus sp.
VNEAAQYWQDVETDVVSGHRLLLVAMEGDKIAGSVQLSLCRKKNGKHRADVEKLMVHTTYRRRGIGNMLMEELERVAKRHQRSLLILDTRTNDPASVLYRKCGFVEVGQILNYVINDKGEFSGTTYFYKMI

SEQ ID NO: 8082 - protein, 488 aa, Xenorhabdus sp.
MNKTAPVGLWDQPKPFFMIFFVELWERFGYYGVQGILAVYFVKQLGFSETQAFITFGAFTALVYGLISIGGYVGDHLLGTKRTIILGAIILAIGYFLIGLSIMEPELIFYALGTVAVGNGLFKANPASLLAKCYQPQDPRLDGAFTLFYMSINLGSLVSLSLAPVIAEKYGYAVTYNICGIGLIIALLVYIACRRMVHDIGSEPDHAPLNYITLFLVLLGSAVMVGVCAWLLHNIDIANLVLMAISAIVVVIFFWQAFKQDKVGRNKMFVAFILMIQAIVFFMLYNQMPTSLNFFAINNVNTQIFGFNINPISFQALNPFWIIVASPILAVLYTRLGAKGKDFSMPTKFTVGMFLCSLGFLTAAASGLFADEHGMTSPWFIVLVYLFQSIGELMISALGLAMVAAFVPSYLTGFILGMWFLSQAAASVLGSYIATFTAAPEGVTDPLQTLPIYTGVFGKIGIATLIVAVVMAFMVPWLNRIMKDGARA

SEQ ID NO: 8083 - protein, 173 aa, Xenorhabdus sp.
MMSLENEHRLLFRDAMASLSAAVNIITTDGPAGRCGMTATAVCSVTDTPPTLMVCINRNSAMNQVFQGNGQLCVNILNHEQELLARHFAGMTEASMEERFSWDIWHTGSLGQPMLKGTLASLEGSIEQVQEIGTHNVYLVEIKQLHVLEEGHGLIYFKRAFHQVMNKTLATAV

SEQ ID NO: 8084 - protein, 520 aa, Xenorhabdus sp.
MKPEDFRADKTRPLTSKEYMQSLQDGREIYIYGKRVKDVTTHPAFRNAAASISQLYDALHDPKTHDILCWDTDTGSGGYTHKFFRFATSPDDIRQQRDAIAEWSRQSYGWMGRTPDYKAAFCCALGAYPEFYGQFADNARSWYKRIQENALYFNHAIVNPPIDRHKPADQVKDVFIQIEKETDAGIIVSGAKVVATNSALTHYNFIGFGSAQVMGDNPDFALMFVAPMDSDGVKLISRASYELTAGATGSPFDYPLSSRFDENDAILVMDKVLIPWENVLIYRDFDRARNWAVQSGFARLFPMQACVRLAVKLDFITGLLQKSLECTGVVDFRGVQADLGEVVAWRNLFWSLTDAMWAEAKPWEGGAYLPDTQAIQTYRVMAPMAYTKIKNIIESNVTSGLIYLPSSVRDMNNPEISQYLEKYVRGSNGIDHVERIKILKLMWDAIGSEFGGRHELYEINYAGSQDEIRLQCLRHAYGSGNMKKMTELVDQCLSDYDVNGWVSPHLHNNNDINLLDTLLK

SEQ ID NO: 8085 - protein, 289 aa, Xenorhabdus sp.
ISNIDISKDYDETQGSDDVHYQTFGRMAAFFGRDMQAHRHDGFFQLHYLVTGRIELQLDDLRYSVQAPLFILTPPSVPHAFFTQEGTDGYVLTVRQELITPLLNSLYPAHRELIDIPAFCLSIADKPDELETFNHYWALIRRESANQFAGREQSLTFLAQSLFTFLLRSIPLEDHRAGGVRGELKLFQRFNQLVDQHYSQHLTVPEYAQILGITESRLKDMCRRFANRPPKRLIFDRQLREAKRLLLFSDSPVFEVAYQLGFKDPAYFARFFNRLEGCSPSIWRENNVK

SEQ ID NO: 8086 - protein, 449 aa, Xenorhabdus sp.
MSSSPEAIQKHDAPDYSHKNLTAQQQSVIKKLFRRLILFLFVLFIFSFLDRINIGFAGLTMGKDLGLTSTMFGLAATLFYVTYVAFGIPSNIMLGIVGARRWIATIMVLWGIASTATMFATGPTSLYILRMLVGIAEAGFLPGILVYLTYWFPAYYRARANALFMIAMPVTMAFGSLASGYILEMDGIWDLRGWQWLFFLEGFPSVLLGIVVWFYLDDSPEKAKWLTNEDKKCLQEMIENDKVSLAHAEPSHAKTSLWREIFTPIVLMYTFAYFCLTNTLSAINIWTPQIMQSFNQGSSHTVIGLLTAIPQFCTILGMIYWSRRSDRLQERKMHTALPFLFAAAGWILTSLTGNSMIQLLGIIMASTGSFTAMAVFWTTPDQSISLRARAIGIAVINATGNVGSAVSPLLIGWLKDQTGNFNSGLYFVAGLLVIGALMVLLIPMKHARS

SEQ ID NO: 8087 - protein, 269 aa, Xenorhabdus sp.
MDQLTNRFKQALQSGQPQIGLWLGLCSSYSAEILAGTGFDWLLIDGEHAPNDISSTLNQLQAIAAYPSQPIVRPPWNDPVIIKQLLDIGAQTLLIPMIQNAEQAREAVRATRYPPEGIRGVGSALARASRWNRIPNYLARANEEMCVLIQVETREALNNLSEMLTIEGVDGVFIGPADLSADMGHHGNPQHPEVKATIEQAIRQINTAGKAAGILMTNTEAAEHYLDLGVKFIAVGVDTTLLSNAASSLAAHFGKGQENTVSSVSNAAY

SEQ ID NO: 8088 - protein, 267 aa, Xenorhabdus sp.
MLQQEVVSQVARRLYLAEKDRKQIRQISLDYPEITIEDAYAIQREWVSMKMAEGRVLKGHKIGLTSRAMQLSSQIEEPDYGALLDDMFFQSGSHIPCERFIVPRIEVELAFVLAKPLQGPNCTLFDVYNATDYVIPALELIDARCHNIDPETQRPRKVVDTISDNAANGGVIMGGRPIKPHELDLRWVSALLYRNGVVEESGVAAAVLDHPASGVAWLANKLASHGVQLEAGQIILSGSFTRPVAARKGDTFHVDYGALGSVSCYFS

SEQ ID NO: 8089 - protein, 490 aa, Xenorhabdus sp.
MTNHLDAVLHDSLLLRQQGYIDGKWLDADNKATFAVTNPATGDIIANVSDMGAAETHRAIKAAEKALPAWRDLTAKKRSQILRQWFNLVIDNQKTLAELLSIEQGKSHAEAMGEIAYGASFIEWFAEEGKRIYGETIPSPMPGCRTSTIKQPIGVVAAITPWNFPNAMITRKVSPALAAGCTVVLKPAAETPLSALALVVLAEQAGVPAGVFNIVTGMDAKAIGEALTSSPIVRKLSFTGSTRVGKLLMAQSADTVKKLSLELGGNAPFIVFDDADLDAAVKGAMAAKFRNSGQTCVCANRILVQENIYEAFAERLAQAARELHVGPASDSSSQQGPLINQAAIDKVQAHVSDAVSRGARLLTGGKSHKLGGLFFEPTVLADIDETMQVAHEETFGPLAALFKFRDEEEAIRIANSTEYGLAAYFYSRDIGRIYRVAEALESGMVGINEGLISNEAVPFGGIKQSGLGREGSRYGIEDYLEVKYLCFGGL

SEQ ID NO: 8090 - protein, 132 aa, Xenorhabdus sp.
MPHFYAECTENIRKEANLPELFAKVNQALADTGIFPQAGIRSRAIWLDTWQMADGKQDYAFVHMTLKIGAGRSAEDCQKVGEMLFSLIKAHFADLMAQRYLGLSFTMEELDPILNYKSNNVHKLFKSKTKTL

SEQ ID NO: 8091 - protein, 291 aa, Xenorhabdus sp.
MGKLALAAKITHVPSMYLSELPGKHYGCRQSAIDGHKEISRRCRELGVDTIIVFDTHWLVNSAYHINCAEHFSGIYTSNELPHFIRDMSYEYDGNPELGRMIAEEARQMGVRAKSHEIASLTLEYGTLVPMRYMNSDRHFKVISISAFCTVHAFEDSRKLGEAILRAIEKYDGTVAVLASGSLSHSFIDDQRAEEGMNSYTREFDEQMDNRVVKLWKEGRFREFCDMLPEYALYCRGEGNMHDTVMLLGLLGWDKYDGKVEFLTELFASSGTGQVNAVFPLPHSVNQTTSV

SEQ ID NO: 8092 - protein, 429 aa, Xenorhabdus sp.
MKERARLMRRLGELIDQNVPEIAAMETSDTGLPIHQTKNVLIPRASHNFDFFAETCQQMNGRTYPVDDKMLNYTLIQPVGVCALISPWNVPFMTATWKVAPCLALGNTAVLKMSELSPLTANRLGELALEAGIPAGVLNVVQGYGNTAGDALVKHHDVRAVSFTGGTATGRLIMQNSGLKKYSMELGGKSPVLIFEDADIERALDAALFTIFSLNGERCTAGSRIFIQESIYPEFVKRFAERASRLRVGDPQDLNTQVGSLISHQHWEKVSGYIQLGIEEGATLLTGGPDKPADLPDHLKNGHFLRPTVLADVDNRMRVAQEEIFGPVACLLPFKSEEDGLRMANDVEYGLASYIWTQDVSKVLRLAQGIEAGMVFVNSQNVRDLRQPFGGVKASGVGREGGEYSFEVFAEVKNVCISMGNHPIPRWGL

SEQ ID NO: 8093 - protein, 234 aa, Xenorhabdus sp.
ENVLLPDGSRISGLDVVWLPPATGTLFALGLNYADHATELEFKPPEEPLVFIKAANSFTGHRQVSVRPDNVEYMHYEAELVVVIGKPAHKVSRANAMDYVAGYTLCNDYAVRDYVENYYRPNLRVKSRDTLTPIGPWIVDKHEVADPHNLILSTWVNGELRQRGTTADLIFDIPFLIAYLSDFMTLQPGDMIATGTPKGLSDVVPGDEVIVEIEGIGRLVNHIVSQQAYEESLS

SEQ ID NO: 8094 - protein, 215 aa, Xenorhabdus sp.
MKGTVFAVALNHNSQLDFWRKAFHKAPYNALPQTPVWFIKPRNTVITSGDVIPHPIGETVQSGATLALFISTNNVGKAARKVSAKDAEQYIAGYALANEVSLPETSFYRPAIKAKCRDGFCPIGQMSDVKTIDSLDIITEINGQEVDRWSTHDLVRSASELLSALSDFTTLNEGDVILLGTPHQRATLHPNDTVTIRADGFPILQNTVVLAGGQA

SEQ ID NO: 8095 - protein, 205 aa, Xenorhabdus sp.
MKQLFRMNLVEETASYTDRARLFRALDGDNQQVEDPLHILQEFAHSNGQAMQQLAARTPAEDLNKAVDLLANAGNIYIIGLRRSFSVASYLTYALSHLECRPLLVDGLGGMFREQMNMIGANDVVVSISFTPYAEETVMVSERAAQAGAKQIVITDSQISPLASFNDVCFVVKEAKVDAFRSQSATLCLVQSLAVALAYRQENAG

SEQ ID NO: 8096 - protein, 28 aa, Xenorhabdus sp.
VDSHSLMQPLGVCAGITPFNFPAMVAMW

SEQ ID NO: 8097 - protein, 313 aa, Xenorhabdus sp.
PIIGLYKDDSVTDILINRYDEIWVYKNGKPEKSNCNFNSESSLNSWVSQIATVLKQPYGKNSSYKAGDIIEPILDARFPDGSRIMATSPLISPQGTTVSLRKAPKVFLDKNDFLSGGMFNEEIFDYLVNMIKERKSFLVAGNTGSGKTSLLRFLASYIDRNERMITAEDTQELHINRYFPLGIALESPHRNDINSSLPQLVNTTLRAQPDRVWVGEIRTGEAIVAFYLVCVSGTTGNAATIHSSTPIGALNKMQWLISSQLNIDFATAGNLVKSEINVVIQCRRDHKIGRKITDIVEIINGEPKTIFSYSANK

SEQ ID NO: 8098 - protein, 84 aa, Xenorhabdus sp.
MNLTFSEESWNDYLDWQQTDKKMVKRINELIKNIKRTPFTGIGKPEPLKHHLTGFWSRRITDEHRLVYRVTDKGLEIASCRYHY

SEQ ID NO: 8099 - protein, 146 aa, Xenorhabdus sp.
STAIDFLTGDEKLACEAILCLSSGHRPQECRPSLNRFFNIRDKKPWKTIQKRINFLKLCPESKEENMSSLIDVISNSAERCKASVLNNELYEEKYVTRCTGGGGRSDPHCNRIYYFRINPNLPTYCNNYVNHEYTDLNIRYVGSSD

SEQ ID NO: 8100 - protein, 485 aa, Xenorhabdus sp.
NADHYMDMLFSKFEYVEILSISTFLNIIAVLLLPYILVFVNRRYIKPKISALFRKYRVSQTSDTLSDVRIEHDKNKAKEFNPESFYKNGEIFLGLDEEENPIYITDKEFCGTNIKVLGATQTGKGVIQGVLLDQSIKKGWGSVFIDQKPDHFIYTIMCNAAKKVNRNIIVFDANEFRGVSYEPFLHGNKRDRISRLHTAFNLDNGGTDADFYKRKARNCITKIQHLWDGKIDSLSRLLKGDHPELSDNDNEFIRTYADAITECINEWKDLTSIGQSQNILNIYDIVRHGKVIYIKGNLKDKTVKSICRNILTELSQAIIEISPDKHNYIAVDEIRFIISSEIAGALATILASNANMSIAYQERDDLLNIDDESDAVCKSIMKSTETNTNITIVHQCYSETAEWISGNSGTIAKSLTKLEEVDTDGFGAESWGGKRMIGQDKEYLIPVNTILSLPARVSVLQRIGSLSKILHTCWISIDEKMPLPT

SEQ ID NO: 8101 - protein, 109 aa, Xenorhabdus sp.
KSVMTKTELHVFNEIQKDLDSRYHLLAQVRLADIVKVNTDIYKARSSEWQSLFNKISRWHCDFVIMEIKTGKVLCAIELDDHTHRADKRINRDIDFNDILKSAKISLFR

SEQ ID NO: 8102 - protein, 68 aa, Xenorhabdus sp.
DANSLVGNRIKILRKEVGISSKLLATRIGTSQQQLSRYERGTNRIYINHLVSISTELNTPISWFFIDC

SEQ ID NO: 8103 - protein, 95 aa, Xenorhabdus sp.
MKFAQSLQKKWQPNSLNFSEVFRWAIERGTPEQCQMLWDLYHTTTDDDYTRLAIRLNRTIKDADLSVILLFTGKNRRIIKNIEMLEQLNEKRGLQ

SEQ ID NO: 8104 - protein, 66 aa, Xenorhabdus sp.
MIAKLSKELEINTASQTLLYILMDYERINTLLTDRTKLLENQQQELDNIKEKIESYKLAHRDLFGI

SEQ ID NO: 8105 - protein, 66 aa, Xenorhabdus sp.
MTTCTTNGRLLKAWYTEESMIIHANINLRTREVILDCMKIWNAQEYECIELSDFVMMLRVHQNYLV

SEQ ID NO: 8106 - protein, 98 aa, Xenorhabdus sp.
MSKITLKKPDISLDNTAIEKTTNSAIARFILDGDKRPSNGNTIASTFRLPQKFIDMLEEEAMRTGQNKTTIVKACITAYHLFLDDSQKNQSILESRKI

SEQ ID NO: 8107 - protein, 215 aa, Xenorhabdus sp.
VIVFASDKGGVGKSTTAVNTAVMLSDKGKKTILLKTDKNRDLVNWGNKRKQEGLSTIPVYEAYGNVSNEIKKLEALCDVLIVDCAGHDSSEYRSAITVADIMITLVKPSSNFEKETLTSVTETVRKVQNMANPKLKPWVLMTRVKPHKIIDAIALEKELKSDQIWIQPLKTRISELDVFENACNVGAGVHDVTRAPSLGKAKAQIELMVKEIGLL

SEQ ID NO: 8108 - protein, 73 aa, Xenorhabdus sp.
MSESASKICGLHYEIYASKLIGDLLEYISKLNEIEAKILCDYAKDRGIVVNKESYQQALIEEKECLIEISNGN

SEQ ID NO: 8109 - protein, 45 aa, Xenorhabdus sp.
MLSYDEYRALEETSYLLRSPANARHLMDSIEALNNGKGIEVDIQE

SEQ ID NO: 8110 - protein, 276 aa, Xenorhabdus sp.
RLAGALKIHDWNRNTPLYKQRCERNQRVSIRSERRETFSELALAMIAYADYNPDSPYLFEVMCSTEKLASLCGQLYQYDNGRKSYDPIRLAILDWEAAGMIYVDRDKDSETKKYKAQRIWLKSEFFTGLGFSLSELREIIIRFRRWMEKKGLRKDHQRIYTEHTLRLARSNVASLDNKHSLKKLLLKVKRLVLGDDEALKKEKEHAIKALEHRKKLIEATEPKPDENQVNHNIYQKWVQKHPMARKISFENEIKNLYPELSGNELLRAYVKHLPDK

SEQ ID NO: 8111 - protein, 47 aa, Xenorhabdus sp.
MSNNDKELRVFIPQDLRDKLVAFCKKEGYTRSAYLTLLLERESQKWE

SEQ ID NO: 8112 - protein, 125 aa, Xenorhabdus sp.
VENTKIDVKGNFAQEKQKIELSKSQQYQPRFIDPLSAYTRTVFPKEISTVREAVQYILEPTGYKLVTEYPAPTTANVLMNQRLPMSMKLNRTMPIIDALQLLIGINNTIIIDPSHRLVSFEKGHR

SEQ ID NO: 8113 - protein, 219 aa, Xenorhabdus sp.
MNNAVSNNIVGYTNDNPYNASVDGLVKIPVGTVINGITTMSAISDYQGGSMKAMITHDIYDASNTNILAPKGSEVIIKVVRASGVNEVLQNRLAFLPSWLVLPNGDRIDFSKTTGLDRMGIPAVKGDDVDRHFLAQFFGVAAYALIGTKTSYEGSGGNSDQTFAGNFGAGARTQAGGLTQKYLQVVPTVTLNAGQPIRIITEDEIFVKPWGSIYENYID

SEQ ID NO: 8114 - protein, 89 aa, Xenorhabdus sp.
MKASLNAVAKSQGLYDVVGSDFTAYKAIQFAEDNISTLFALVAFIFIAAIMIFGSFKLAAMFLSGGSGSAGSGLNNGATALAKKIAALL

SEQ ID NO: 8115 - protein, 81 aa, Xenorhabdus sp.
MEKHYSNLTKEQALSELKKLVELEKQVKKDESNIQYWNGKLYTYQLDSEANFILKKYFQGLTANQGMVSAKQIVARKGNSI

SEQ ID NO: 8116 - protein, 256 aa, Xenorhabdus sp.
MAYAAGIPVGDATNALHQLAKLTQDLKNYDEYITQTLLSKEELANALRQYDQMLADYNQILTDARALKDSIEGMSPEEWLNELARAANRHDPLYGSTAIRTNTGYRPWDDAVERNRLLNGYGMTDEEYASMLADIPFSGDDRNRAQQVFEYRQRKVAEGITRDAYVISLQGNLAEQAKKLTQMDRRRLENQVDNNTTASIQFLAEQNQQLLYQFHTMQTQQAESMKFSDRLADHYFNNMAKAEERRTKQQLEKIKK

SEQ ID NO: 8117 - protein, 34 aa, Xenorhabdus sp.
VRKRGEQTGLDTLVVHAVNDVDLEVVALSRGFRS

SEQ ID NO: 8118 - protein, 37 aa, Xenorhabdus sp.; identical to SEQ ID NO: 4797

SEQ ID NO: 8119 - protein, 309 aa, Xenorhabdus sp.
MPIRVPDELPAVNFLRNENIFVMTSTRANVQDIRPMKVLLLNLMPKKIETENQFIRLLSNSPLQIDIQLLRIDSRRCRNTPVEHLDNFYCDFESIKDQNFDGLIVTGAPLGLVKFEDVTYWEEIETVINWAREHVTSTLFVCWAVQAALNILYNLPKYTRKTKLSGVYSHTILEPLALLTRGFDETFWAPHSRFADFPESAIRQYTDLDILASSEEAGTYLLASKDKRLVFVTGHPEYDVGTLAAEYQRDRTAGLEPVLPVNYFPDNDPENKPVATWRSHGHLLFSNWLNYYVYQITPYDLTYMNPSLD

SEQ ID NO: 8120 - protein, 532 aa, Xenorhabdus sp.
MTQQVLATELTFIKPFSDAEKKVLSSESIHFLEDLVVKFADRRKKLLEDRINWQKKIDNGKLPEFISETSSIRNGDWRIQGIPEDLKDRRVEITGPVERKMVINALNANVKVFMADFEDSLAPSWDKVIDGQINLRDAVNGTISYTNEQGKRYELKSDPAVLIARVRGLHLSEKHILYKNEPISGGLFDFAIYFYLNYKQLLAKGSGPYFYLPKIQSYHEAQWWSDVFSFAEERFNLPKGTIKATVLIETLPAVFQMDEILYHLRHHIVGLNCGRWDYIFSYIKTLKNHADRVLPDRQSVTMTQPFLSAYSRLLIKTCHRRGAFAMGGMSAFIPSKDPEQNQIVLDKVRADKELEANNGHDGTWIAHPGLADIAMEVFSSKLGERPNQLMVSREEDGEITAAQLLEPSLGERTEDGMRANIRIAVQYIEAWISGNGCVPIYGLMEDAATAEISRTSIWQWIHHEKSLNNGQKVTKELFNQMLKEELAVIKQEVGEVRFNEGRFTEASELMKRITTQDELVDFLTLPGYQLLD

SEQ ID NO: 8121 - protein, 435 aa, Xenorhabdus sp.
MTVSRAQQITQLEQEWKKARWEGINRPYRAEDVIKLRGSVNPEHTLAQMGAKKLWELLNGKSKKGYVNALGALTGGQALQQAKAGIEAVYLSGWQVAADANTASSMYPDQSLYPVDSVPNVIKRINNSFRRADQIQWANGIGPDSVEYTDYFLPIVADAEAGFGGVLNAFELMKAMIEAGAAAVHFEDQLAAVKKCGHMGGKVLVPTQEAIQKLVAARLAADVSGVPTLLIARTDADAADLLTSDCDPYDSEFLTGKRTCEGFFCTRAGIDQAISRGLAYAPYADVVWCETSTPDIEAARRFAEAIHAEYPGKLLAYNCSPSFNWKKNLDDKTIASFQEQLSELGYKFQFITLAGIHSMWFNMFDLAYDYARGEGMKHYVEKVQEREFASLERGYTFSSHQQEVGTGYFDKVTTIIQGGTSSVTALTGSTEEQQF

SEQ ID NO: 8122 - protein, 610 aa, Xenorhabdus sp.
VADMETDLAHLIAQTILQGFDAQYGRFLEVTSGAQQRFEQADWHAVQQAMKKRINLYDHHVGLVVEQLKCIRGSRLYDQEYIAKVKVVYTRLLPDYPRFEIAESFFNSVYCRLFQHRNLKQENLFIFSSQPPRRFRHIPRPLSRDFFPDSGLESMIWAILKDLPLRLEWENLDRDISYITRYLQNTFPGYDLLQATFQVANELFYRNKAAWLVGKIRLGTEVYPFLLPIHHNESGQIFIDTCLTNHDDASVVFGFARSYFMVYAPLPAAMVEWLREILPVKSTAELYMAIGCQKHGKTEYYREYLTFINSSQEQFTIAPGVKGMVMLVFTSPSFDRVFKVIKDKFAPQKEVSQERVQECYRLVKEHDRVGRMADTQEFENFVIDKRHISPELMEEIQKEIPDKLEDLGDKILIKHLYMERRMLPLNIYMEQVDEDRLKDAVEEYGNAIKQLAAANIFPGDMLFKNFGVTRHGRVIFYDYDEICYMTEVNFRDIPPARYPEDELASEPWYSVAPNDVFPEEFRHFLCSDKRIRKYFEEFHSDLFKADYWRALQERIRKGHVEDVFAYRLRQRFSQRNENRAEEQGITKYAESLCEENNVVVLASPNRDIHS

SEQ ID NO: 8123 - protein, 548 aa, Xenorhabdus sp.
MKNINPSQTEAWKALQQHFEQIKDTHLRDLFEQDKARFATFSATFDDQMLVDYSKNRITAETLEKLQALAKETDLSGAIHSMFSGEKINRTEDRAVLHIALRNRSNSPIKVDEEDVMPQVNAVLAKMKSFSERIISGEWKGYTGKAITDVVNIGIGGSDLGPYMVTEALKAYKNHLNMHFVSNVDGTHIAETLKSLDPETTLFLIASKTFTTQETMTNAHSARDWFLQSAVDEVHVAKHFAALSTNEQEVSKFGIDPQNMFEFWDWVGGRYSLWSAIGLSIVLSIGYDNFEQLLNGAHAMDKHFAQTAPEQNIPVILALIGIWYNNFFGAETEAILPYDQYMHRFAAYFQQGNMESNGKYIDRNGSPVDYQTGPIIWGEPGTNGQHAFYQLIHQGTKLIPCDFIAPAISHNPIGDHHSKLLSNFFAQTEALAFGKTQAQVEAEFVAAGKNVQDVANVVPFKVFEGNRPTNSILLREITPFSMGALIAMYEHKIFAQGAILNIFSFDQWGVELGKQLANRILPELHDSESVNSHDSSTNGLINRFKEWR

SEQ ID NO: 8124 - protein, 75 aa, Xenorhabdus sp.
MMVKLADVLGVTVDYLLTGNPVEDSPLANSRLFRRFQVLERLAQEDQETVIKIIDAMIAKQRMESALLPVDEPEG

SEQ ID NO: 8125 - protein, 121 aa, Xenorhabdus sp.
MVRIIILKHFHNLSDEKMEYQLLDRMSWQRFCRLTDVINIPDRNTIWCFEKRIGQEGARALFEEAKHQLSAQGFIPRGGQIIDATLIPVPKQHNKKEETQQPPTKVGGLVINGLKVRIRIG

SEQ ID NO: 8126 - protein, 141 aa, Xenorhabdus sp.
MWYEISDSYVNDSYGFAPIVSGITGAGRVTKEDTIHYENPRYSRTMEIAEEHYNKLKKYGELTKSGNNPDFNLGYNGATNSCIDFTWKALRSAGLIPEITWNDFTGINKINKIFKKFDGDFKVDNNIPHKNQFLRHSLIVS

SEQ ID NO: 8127 - protein, 610 aa, Xenorhabdus sp.
SGLRFTLITENLPEQTFAVVDFSLHESLSSPFRLEATLTCKSPEIDFANVLDSNAAFAVHRNGQVERQITGMVTQFSLISTGRHVSHYRITIQPPLWRTSLRVNSRIFQNQSVVDIVESLLRENGVRSFFFALGYKHPPREFCVQYDESDLAFIQRLLADEGIFYYFVFDQEQHEQRIIFHDSSLSLNQVISVPYRPEADVTGETTCIHQFSWSERVGVANITTKDRTFKNPRWNREFWYEGRNLNNQRILNSYHYYDFPSRFKDDDLGQRASQYHLEYLRRDTQLGNGHGDCFAIWPGQLFNLTDHPRETFNDQWQLIHITHSGRQPQADETQSGDSGTWLSNQFTLTTRKNSYRPSPYPKPKMEGPHIATVVGPEGEEIFCDEHGRVRIQFDWDRYGEFNDQSSCWVRVSQAWAGQLMGMIAIPRIGHEVLVDFVHGDPDQPIIVGRAYHANNIPPNRLPMAKTQMSIRSKTHKGEGFNELRFEDEKDREEIFIHAQKNLAIQVRNSRDERINYDRTTSIGHDDELVIANNRKITVEGQQDHKTTGNYIEQIDGDRALQIKGDLAEKIQGVVSVDAQGDLTLQSGSKLTLRVGCLLIIFHRSRDLDSK

SEQ ID NO: 8128 - protein, 396 aa, Xenorhabdus sp.
MEVIRDSEIYALVGEHVIQVGIFREGQSLKVAQDEREDSDYYVFKFGNGKGYIAKNHLKEIKKASFPSDPFPILNNKIAQGLATFQKTKVYSTLKADSKPIAVLAADLRYPIQEKVQDIKHNIWYEINLGGRLGYIRAQDAEQDNGIPVLTYHHLLEEKENKRFLHTSTTTSLKAFRNQMDYLKQAGYTTISLYELEGYLKGAVNLPAKVVALTFDDGLKSVYRYAYPILRKNEQKATLFIISSRIKRHPQKWNPNNLQFLSLNELLSMQDVFDFQSHTHFLHRLGKNKKPILFKRSYRNILYDFERSRRALSQFNPHVIYLSYPFGGYNMSAMKAAKNAGFHLAVTTVQGKVKLGDNPFSLKRLYILRTDSIEKMAKMIANKPRDISFSKINSKK

SEQ ID NO: 8129 - protein, 84 aa, Xenorhabdus sp.
VSQRKKSTVVKENAIKMALSTCQPVDNDVHQQRFGHAIKENKRIYNKLCNLAERQLLFFDDDKIKLTRNGKVLVESIVNTEFND

SEQ ID NO: 8130 - protein, 393 aa, Xenorhabdus sp.
KIGASALILSVLSAWVLSVPAFAKLEEGKLVIWINGDKGYNGLAQVGDRFMQDTGISVSVEHPDKLEEKYPQIAAVGDGPDIIFWAHDRFGGYAQSGLLAEVTPDKNFMDKLFPFTWDAVRYEGKLIGYPIAVEALSLIYNKDLVKSPPLTWEEIPILDNELKKQGKSAIMFNLQEPYFAWPLIAADGGYAFKRQGDTYDIKDSGVNHTGSKAGLEFLVSLVKNKHLSADTDYSIAEAAFNKGTTAMTINGPWSWGNIDKSKINYGVTLLPTFKGQPSKPFVGILSAGINAASPNKELAKEFLENYLLTNDGLAMMDKDKPLGAVALKSYQDILAKDPRIAATMNNAQKGEIMPNISQMSSFWYAMRSAVLNAISSRQPVDAALNDAEARIVK

SEQ ID NO: 8131 - protein, 514 aa, Xenorhabdus sp.
LNKNVWWLRSVLKWFAVGLSLSFTGYLIVLMYAQGEYLFAILILVLLGSGVYVFANSKSYAWRYTYPGIAAMLLFVLFPLICTITIAFTNYSSTNQLTLERAQAVLMSRHYQTGQSFNFKLYPQDQQWILVLNVADSSNVLVSEPFSLSDKEKIILPLYEQVTRFNHDAATLRTITQNRQALGQITVILPDNSRLRMSSLRQFSGIHSLYTLEKDSHTLIDNQTGVKYRPNMETGFYQSIDAKGEWGDGTLNPGFTVSIGWKNFLRVIQDEGIQKPFLSIFVWTVFFSLLTVILTVALGMILACIVQWEALKGRAIYRVLLILPYAVPSFISILIFKGLFNQSFGEVNLLLNGLFGLKPDWFTDPTLARTMLIIVNTWLGYPYMMILCMGLLKAIPDDLYEASAMDGAGPLQNFCYITFPLLIKPLTPLMIASFAFNFNNFVLIQLLTNGRPDHIGTTTPAGYTDLLVSYTYRIAFEGDGGQDFGLAAAIATLIFLLVGALAIINLKTTRIKFD

SEQ ID NO: 8132 - protein, 296 aa, Xenorhabdus sp.
MAMVQSRSQRWRIWATHIFMLIFIASILFPLLMVIAISLRPGNFATGSLIPESISWEHWKLALGYSVESSDGRITPPPFPVILWLWNSVKVAFITATGIVALSTTCAYAFARMRFRGKNTLLKGMLIFQMFPAVLSLVALYALFDRLGEYIPFLGLNTQGGVIFAYLGGIALHVWTIKGYFETLDRSLEEAAMLDGATSWQVFRLILLPLSVPILAVVFILSFIGAITEVPVASLLLRDVDNYTLAVGMQQYLHPQNYLWGDFAAAAVLSAIPITVVFLLAQRWLVGGLTAGGVKG

SEQ ID NO: 8133 - protein, 905 aa, Xenorhabdus sp.
MLIPSKLSRPLRLNHMVMRERLLAQLNEAQNYRLVLVTSPAGYGKTTLMSQWAVGQGNLGWYSLDDSDNQPERFASYLIAAIQQATQGHCVKSEVLAQKHQYASLSALFAQLFIELNEWKQSLFLVIDDYHLIVNNLIHEAMRFFLRHQPENLTLIILSRQLPSLGVANLRVREQLLEFDSQQLAFNYQEAQQFFDKRLPSPLDADNCRQLCHDVAGWATALQLIALSARQAGNTAEISAKRLSGINAGHLSDYLVDEVLNRVDQETREFLLRSSILRSMNDGLIVCLTGMENGQQRLEDIERQGLFIQRMDDFGEWFCFHPLFASFLRQRCHWEMAADLPKLHSTAAEGWLMQGFPGEAIHHALAAGDTKLLCDILLQYAWELFNQSQLSLLEECMNALPYEQLLENPRLVLLQAWLAQSQHRHYEVNALLNQAEQSLKQKQIMIEAELLGEFDALRAQVAINDGRPDDANLLAEKALAALLPDNEYGRIVAMSVKGEVLHCKGALSQALALMKQTEQLARRCHVYHYALWALLQQSEILLAQGYLQGAYETQKHAFDLVREQHMEQLPMHEFLLRIRSQLLWCWARIDESEEAARQGLEVLSNFQPQQQLQCLSQLAKCSLIRGDIDNARRHLTRCENLLSNGHYHRDWRTNTDKLRIIIWQHLEDNISVTQWLAQAEKPESFSNHFNQNQWRNIARAQILLGQYEEAESILNMLNQYAVKLELVSDLNRNLLLCNLLYWQLGRKAEAQQVLIEALKLANRTGFISHFVLEGELMALQLRQLIQINILPDFEQHRAQRILREINRQHRHKFAHFDETFVKQLLTHPDVPELIRNSPLTQREWQVLGLIYSGYSNEQIATELEVAATTIKTHIRNLYQKMGITHRQEAIQQAQNLMKMMGLGVQ

SEQ ID NO: 8134 - protein, 257 aa, Xenorhabdus sp.
VMAESQEETPQYIDLEQFIQLGSSDNIACLIIEPIQGNGGNIVFPVEFYRKIREICHQHGIIIIADEVQTGFGRTGTFFASTGYAKELEPDIIVFAKGAGGIGIPTGGVLMRSSLDVLESFEHSSTSGANPLSLVALNEIINIIEDEHILDNVIQNETFLRDGLLDLQHKYSEITGVRGVGYMFGFDTPTPEFAAQAIATASRHKLILRGSRYGKGRALKVRPPLICTQEHLAEILHKLDLTFADLTASVQHQQEVA

SEQ ID NO: 8135 - protein, 353 aa, Xenorhabdus sp.
MKALKFNQSWDIEVQHVEPLSCIEPDDVVVDIAVCGICGTDVGIITGFYPVAVPGTTLGHETTGIVAQVGSGVTCFQAGDRVVINPTYSCGHCRMCLTGSPNHCEKKLGTEAGVSYDGAFAEQYLAKESSLIKLEPHVSMEAASLTEPLSCTLTGVDKLGITHTNIRAVVAGAGPMGMLYLWALHERGVNAFIIEKNPYRMQFASQNLPVGCRLYADFDEALIQEFGDKSTLIDLCVDTTGQLTEYIFDHLAPGGKLLNVALKDKHASLDILKIADKSLSVIGSIDSLNNSFERAYVMIRDGVIPVDRLVSQVFDFDDYQQAFLTVGCDIAAKQQVPLSTPNCKVLIRLSDLK

SEQ ID NO: 8136 - protein, 212 aa, Xenorhabdus sp.
MMEKFNIIFDIDGVIVDSEQLHFDVLRELAPDHTHEIRPQQLIGLSLAQTLSSIGVPLQAQKSITDRIISTYQDKLSPHYLRSGVTDLISALQQNEIVFGFVSTAPREVCLLNLGLLNLREEPALISGDDVKQTKPFPDPYLAMLKLKAMDVRQTLVIEDTDLGILAAKQAGIPWIYAWPHALSGAEKYEQSTGIIRELVDIPQIFGLLNEY

SEQ ID NO: 8137 - protein, 294 aa, Xenorhabdus sp.
MLPGLSILPTPLTLACVLFLFGAGIGAMDVSANIHAVNIEKRVQQPVMSGFHALFSLGGIAGAGSVSLLLLMGISPFLVMIAVTLFTILLLFPVWNGLLDEAEAGDTPFFSVPRGIVILIGFLCFVVYLMEGSMLDWSGILLSSVHNMASHQAGLGYTLFAITMTSGRFFGDKIIAAYGYRRVFLGSAILATSGFVLIYLASGVITLAVAFMMIGAGLSNLAPMFFTASGRQKVMPDALAVSAVSTMGYSGILLGPAIIGGLAHQITLHGAFACIAMLSLSLLAGYRLITPERK

SEQ ID NO: 8138 - protein, 140 aa, Xenorhabdus sp.
MFQLCIEGRFEQLYDQAGVMLLVDEHHWLKAGIEYADGNATIGSVLTAPYSDWAMGIFSGNSEKFWLRLTYREGAIRLQYSTDSKQWPLLRLSPFAINQHNGQRVFVGAMCCSPEREGLQVKFSEFKLMTALNKPLHDLS

SEQ ID NO: 8139 - protein, 36 aa, Xenorhabdus sp.
MEESLFGHGIAVHKASRKSVSGLEASAWDFWLATPA

SEQ ID NO: 8140 - protein, 184 aa, Xenorhabdus sp.
MEKIFSQLDISGTLCDMGCGAGLRLINICRQFGFNGIGMDINANAIELANKNLRETYSGASEIKFKQQDVTIISEINPSVEAILFTFFTHHIEPNERLEKLFNDYRNLFPNLKFIILFDTVTNEKGNSINNIFARGFDYIHRLQGLVPRTRADYMAIFERSCLNVIEEIVLEVDNSYVWLCKVN

SEQ ID NO: 8141 - protein, 260 aa, Xenorhabdus sp.
MMEPMMQKKLTGIERGWWIVSLENRVWLPQGDLPLGTAESWSLQGLVAYAIGEWLGEVVWLVRHKMASDMYSPRRIAEQDPQLFQLVGRGVQLAEFYRSHRYCGYCGHEMQQTEHEWACLCHHCDERYYPQIAPCIIVGIRREDHILLAQHQRHRNGMHTVLAGFVEVGETLEETVHREVMEESGIKIRNLRYVTSQPWPFPHSLMMGFLADYESGDIEHDPVELISADWYRYDDLPLIPGPDTIARRLIEETVALCRQY

SEQ ID NO: 8142 - protein, 354 aa, Xenorhabdus sp.
MNELKNDRYLRALLRQPVDITPVWMMRQAGRYLPEYKATRQEAGDFISLCKNTELACEVTLQPLRRFPLDAAILFSDILTIPDAMGLGLYFEAGEGPRFQSPILNHADVAKLPVPDPEMELGYVMDAVRAIRKALAGQVPLIGFSGSPWTLATYMVEGGSSKAFTKIKAMMYAEPTTLHLLLDKLADSVILYLNAQIKAGAQSVMIFDTWGGVLSQRDYQEFSLRYMHKIVDGLIREHEGRRVPVTLFTKGGGQWLEAMAATGCDALGLDWTTNIADARRRVGDKVALQGNMDPSMLYAQPARIEQEVSTILQDFGTGNGHVFNLGHGIHQDVPPEHAGAFVEAVHRLSAKYHQ

SEQ ID NO: 8143 - protein, 225 aa, Xenorhabdus sp.
MYNTQALRQEQIEKAQQVIRHDVLPASFIPEFIAGADVGFEENGTITRAAIAVLHYPTLKLAEYQIARMATVLPYIPGLLSFREYPALIAAWGKLNLRPDLVMVDGQGIAHPRRFGIASHFGLLVDVPTIGVAKSRLCGEHAPVGEVVGNRQPLIDHGEQIGLVWRSKKRCNPLYISIGHKVSIDSAIGWVEHCMKGYRLPEPTRWADGIASNRAFFRQTMQKSL

SEQ ID NO: 8144 - protein, 213 aa, Xenorhabdus sp.
MNNWKTTAESILTDGPVVPVIVINEIEHAVPLAKALVAGGIRVLEVTLRTACALEAIRLIAREVPEAIIGAGTVINPEQLSAVTEAGAQFAISPGLTDELLKAATAGSIPLIPGISTVSELMLGMSYGLNCFKFFPAEANGGVKALKAIAGPFPQVRFCPTGGISPDNYRDYLALNSVLCIGGSWLVPNDALKKGDYAHITELAHNAITGAKA

SEQ ID NO: 8145 - protein, 604 aa, Xenorhabdus sp.
INKTVERITQRIIERSKETRNRYLARIESARSKTVHRSQLACGNLAHGFAACQSDDKVALKNMVHNDIAIITSYNDMLSAHKPYESYPQKLKDSLHAVGAVGQVAGGVPAMCDGVTQGQDGMELSLLSRDVIAMSAAIGLSHNMFDGALYLGICDKIAPGLVMAALSFGHLPAVFVPAGPMTSGLPNKEKLRIRQLYAEGKVGRQALLEAEADSYHSIGTCTFYGTANSNQMVMEVMGLHLPGASFVHPDTPLRDALNDAAARQITRLTENSGNYLPLGQMVNEKVIVNGIIALLATGGSTNLTMHLIAMANAAGIIINWDDFSELSDVIPLLCRIYPNGPADINQFQAAGGVALVVRELLKKGLLHQDVNTIAGFGLERYTQEPWLNEGQLAWREGTHSSLDNEVIACIGKPFKHHGGTKVMTGNIGRAVMKTSAVPANNLVIEAPAVVFNSQHDIAPAFEAGKLNRDCVVVVRYQGPQANGMPELHKLMPPLGVLMDRGFKVALVTDGRLSGASGKVPSAIHVTPEAHAGGVLAKIQDGDFIRIDGRTGKLTLLLDELELAQRVPYQADLSTGHTGCGRELFGALRTQLSGAEQGACSITFL

SEQ ID NO: 8146 - protein, 276 aa, Xenorhabdus sp.
MTTAIANKRPKKTKMTAGGAAAGGQVQSLSRGLSLLEFISDSQSGVALTDLAIQAGLPNSTTHRLLTTLQQHGFVRQVGDLGLWVIASHAFVVGSSFLQSRNLMVLVHPILRQLMEDSGETINLAIFNIDEYEAVIVDQVQCNALMRMSAPIGGQLPMHASGAGKALLATLSEQKCLQLLHKKGLHAYTQHTHTTATALKENLEQIRKQGFSLDDEEHALGLRCIAACIYDEHHEAFAAISISGPISRISDERVTELGALVMRAAKEISREYGGNK

SEQ ID NO: 8147 - protein, 448 aa, Xenorhabdus sp.
QYIVAKFGGTSVANFDAMNNCADIILANRDVRVVVLSASAGITNLLVTLASGCNSDKREKCLKQIRDIQYAIIGRLNESDVIKDEIDRLLDNIATLSEAASLATSDALTDELVSHGEVMSTLLFVELLRQRNADVEWFDIRRIMRTNDQFGQAEPDTTQLNILAEQHLQPRLNNTIVITQGFIGKEEKGRTTTLGRGGSDYTAALLGEALGLKRVDIWTDVPGIYTTDPRVVPTATRIDKIAFDEAAEMATFGAKILHPATLLPAVRCGIPVFVGSSKQPQAGGTLVCDRTATPPRFRALALRRKQTLLTLHSLKMLHARGFLAEIFILLSRHNISVDLITTSEVSVALTLDTTGSTSTNGSLLTNALLTELSTLCRVEVEEDLALVAIIGNKLSQARGLGKEIFGPLESFNIRMISYGASSHNVCLLVPGQDAEEVVQTLHKNLFEE

SEQ ID NO: 8148 - protein, 249 aa, Xenorhabdus sp.; identical to SEQ ID NO: 7900

SEQ ID NO: 8149 - protein, 99 aa, Xenorhabdus sp.
MEAEGKSPEEIKLTIENTTTSILSGVRTKINQATIPNNDARKKALENVFDGMGRLAEDMLREMAKKEVEKIEKEMGKKLSEEVAKQQIENIAKKIARAC

SEQ ID NO: 8150 - protein, 260 aa, Xenorhabdus sp.
MSLYNLSNSVLSHRKLEDYFFSSISQIYRHIGTGIRVYVTGVETDSLNFLQVVDENDQIAEELKAAIQLMNEQSDVPFLIVAVQPSHQVLAVIEQAGFVFDPDSITTVMKLDLINWQMKNEYCTEYEIRCVDHRLSDWILPVKSAFATGNSISGQYMKCHQAALIAGKCLRHYALYVDEQPVCALTLSRLDNIVRLDDISTVREKMGRGYASALINYVLSEARKKDATACYLEASREGNGVYRRIGFKSLFECQAFVRES

SEQ ID NO: 8151 - protein, 532 aa, Xenorhabdus sp.
VHVVDANLMLELSSCGRGFITAETTTDYTGKLVRLEVGYTDLVLRWFTGYVERSQPAQNGYQRLFVRELVGVFDKAWPCSFQHPTLREIVNWLQEHSGLTFTLPDALYTDKPIPHYTHNGTGYQLLGSLGQLFAIDDYLWHQLPDGSVYLGSWAHSMFAQKPVDIPNEFSQSQSAGNTMTIPMIQSLRPGFVVNQQRLTKVNLLNENMSITWQPKGQTEHKTPAQRQIDAAYPELSAGLHLPKLARIEAHTENTVSGDISDPFRPRYAVDVQLLDADGKDAAAPVYRAVPLPLPMAGSESGMFQYPPIGTVVEIAFEGGRPDKPFIRQTLSQGNTLPDIKPGEQLQQQRAEVSQRVTQEGSWIRQTDQTINESSMHREIKADTETRTVVARDTTIQATDKTLVLGTSTLLAGAVQQVAEGDYSLATSSNYLASVGKNANIDVGQTLIEKIGLLKQSIAGVKQEIVAPVVWVGSPQINVMTLMLDTLDVVKELAELTAAHTHHNTGTPQNASAIRGTAHKSDGLKKKYSPVIG

SEQ ID NO: 8152 - protein, 155 aa, Xenorhabdus sp.
VMFQDQDQSGQSSSTAVAEQGIKPKELRITGIIPFTEQKTLSRLFALAEAKDNGNLKRYRVANLTAQAINFRIGTFTGTIDASKVDGKQAWQVTFTLREHLSVAEKRDARATGAIQAKKQTGQGGTKAGEDPEKLSWFEREVLKPINDGIGGASE

SEQ ID NO: 8153 - protein, 242 aa, Xenorhabdus sp.
MYWQRKTLQLAPDLSGLSAAIVPVHPFIYGIGQQTDSGSYLSPTNAIETLATKLTGAGHINSLILMVCAKTHAEFMQHLTQFSAVLPLPALAQVKRMAKTAESLATTKMQLPGKPGGGLPLPQPLSTATSRQAINAQLIAKANAQASAGSSLAGLKSQLTALTAARQSALQHVTEAISGLAGKSATVWAFAGTGNGAHVAEKLRKNIPEPDAVYTLAVLFAGDDLRSLERMLHHEPNYHPRP

SEQ ID NO: 8154 - protein, 116 aa, Xenorhabdus sp.
MKYYKSKDNQVHAFTSDGSQDAWIEPDFILITEEEARAITNPPPTPEQLQQQAVYEKQYLMDVAKDKIAVWQDAVDLEMATGEEEAALIRWKKYRILLNRVDCFTAPDIIWPEQPE

SEQ ID NO: 8155 - protein, 598 aa, Xenorhabdus sp.
VITTDFEKWKAQQVAAGQPVVLDEFVFANVPNLDPSKDISRSEKLPAQNQIVHRQAVNKTGLASENAVAYSVTLGTEVGHFDFNWIGLINKASGVIGMITHAPTQKKIKTANGLQGNVLIRSFLLEFDGAATETAITTTAETWQIDFTARLTGMDEMQRLINTDSYGEAAFFGDGFAVVRQGEQYLVKKGLAYVGGLRGMLEFDQTLNSLRNTRVYADFSYQGNLVSQWQTVVKMTTANELSNYVDAAGYPHYVFAIAQIDGDGNVTDLRSKGTLSDRDIAHLQKELGGVKQDYATHVALNEVRMNAYPRTGGQINGVVEATHWVGGSKLYDRHDDGGWSQVYSEAHKPSPHEIGAFPASGGVITGDVYAKEAIRVTKWVGAERVYIGKEGEWYEVYSPLKKPTASDIGAYSMTAIDANFALKTSKDTFTCGNLHVNAPHEWPGVVFRKPSGYNTTIASNPDNSESMLTIRYRDRKDNDLYNVDIRKKSGTVALESQLLGVDQIWTDVMSVRSNDTWYVNDTGKPITVYVESQKTDKRTGPFSMGGEVDNYRVGYFWVSTNSIHSFSFIVPPGSRYIVKAGWGVTLTPDAIVRWVELR

SEQ ID NO: 8156 - protein, 185 aa, Xenorhabdus sp.
MQVYGWLTWPLAQLDAETCTEALLSVLAYQRDIQRFNGEPLPLFRKRVKYAFINAKDAGSIAGFIAIFERLGVGYVELLERQPDIDWDVIILRLSDSQIAANPDLLMNIIRQYGRTCRRYRFEVIAKNPLLMRVGNIGADYCTYAAAIPTQPLLIKVGHIAGVAVCDSARLKESTAPNVTYGASL

SEQ ID NO: 8157 - protein, 394 aa, Xenorhabdus sp.
MDTKPTIDYEKVLRDSGMPTTEADISKAFANVVNEAGLVTNTSRMSPFWRLIKTIVTRPVLWLKEALINVTLKNMYLASASGSWLDMFAWGVNLKRKPASAAQGVIRFYKAAGASAVTVPAGTVIQTERINGDIYRVSTTESVAIAEGVSSALLPVTAEVAGGAFNLAPGYFRILPVAVSGIARVQNEEGWLLTPGADAESDDDLRDRCRNQYNLVGNYHTDAVYRGMIAAVAGLSIDRIFFLHDAPRGAGTANAYLLLDSGVTSQPFIEVVNDYITNQGHHGHGDDMQCLPMPETQHDLAVTLFVVSLANYSHEQIATLKRDVENLIRCAFRENSQYPVKKTWPYSRFSFSNLGREIHREFSEIESLTFSLGDILSDLSVPRLKTLSVEVKNV

SEQ ID NO: 8158 - protein, 70 aa, Xenorhabdus sp.
MESGLATELVAERSPTLRADIRTQIEILVEDDERIIPGTVSINEESPIKLWITAETYDFGRLSVSVGHGH

SEQ ID NO: 8159 - protein, 380 aa, Xenorhabdus sp.
MGETCPAESLALRGLTLLYGYDCLRADGPSLVNRMANTSQLVVRWLKLFPNIARWIGYISAGIIGFAAAGAVANIVMGMSKFIWLGLKGIWAACTLVMKLWTAAVWLCNGAILVWNATLRMLRGVLLAVRIAAMLAGVSFTFMTWPILLIIAAIALLAVGIYLLIKHWDAIKAAIMNTTAFKVVAAYVKWLGGIFSVVWDGIAAGWSKLCDWFSSFSLAEAFSNMVDSVSNLFSGLWDWLKESFAGVYNGVIEKLNMIPGVNIETMAIQKTVVEPAINANVPNAGMAGNPQQLASLPNGTLPGQPPMMMQQVKAIKPPESEGVLTGGRKQGIGKQGLIKDVTTNSQTITDNSRRIENVTLNVTGNVTPGQLTEWEQVAYG

SEQ ID NO: 8160 - protein, 211 aa, Xenorhabdus sp.
MTNSDTPLGLRDRAIMEMLWSSGIRRSELQRLQVGDVDFGRGVVFIRLGKGRKDRVVPFGKSAQQWTQSYLEEVRPRLVWGKDPGYLFVSNKGKGLTDGSLTQIVRNALHRAEVEKPGGCHLFRHAMATQMLENGADTRHIQAILGHASLETTQIYTRVAIGHLKEVHQQTHPAERDNPTKSTPESGSGSVSGEPDAELKTPRTGQPASPR

SEQ ID NO: 8161 - protein, 818 aa, Xenorhabdus sp.
VLDWVMKTEHLSLRHACERLRAMLGSNPAVEPLVDSSELIRDAVGQQALLLRVVEFYHQTLLNAPEAHQYLKKRRLDHPELVSHFKLGFANRTLGYRLPEKKIKAGAEIRARLQAVGLMRESGHEHFSGSLVVPVIGLEGQIQEMYGRKITNRLRAGTPLHLYLPGEHGGVWNEAGLVGSASVILCESLIDAMSFWCAGYRNVTCSYGVHGFTDAHRDAFRQYEIRQVHIAYDNDKAGNEAAATLAAELQLMGLDVWRVVFPEGCDANRFSCEVANPENAFGQLLESAQWLGEPTKTPLSDPSAAIAVPISTAALVPEPGVVTTLEPNGDIVIRQDGQEWRLRGVPPKIGAVMKINVQLLDKNSGALFVDSLDILSARARTGFVRQAAQELALPDTLIKRELGRVLLVLEQRSWMAAETEHTANSLNADEQQAALALLQDPQLISRITADLAACGVVGESTNLLAAYLAAVSRKLPKPLAVLIQSSSAAGKSSLMDAVLNLIPEEERIQYSAMTGQSLFYLGETNLQHKILAIAEEEGVRQAAYALKLLQSDGELTMASTGKDEATGNLVTKSYTVKGPVMLMLTTTAIDVDEELLNRCLVLTVNESREQTEAIHALQRQKQTLEGLLAESEREYLTQLHQNAQRLLKPLNVVNPYASQLTFLSDKTRTRRDHMKYLTLIQSIALLHQYQRDIKTAVHRGKTLEYIEVSKDDIRLANQLAHEILGRTLDEMPPQTRKLLLLIQAWIRDSGQPRHERIFTRKQLRDAVQWGDTQLKVHLSRLVEMEYLLLHRRGLAFAYELLFDGDDSDTAYLCGLIVP

SEQ ID NO: 8162 - protein, 458 aa, Xenorhabdus sp.
MFQTHAEQWADETFSRANLGDSRRTKRLIKFTASLANHIGQSIVQSLKTPADIEAAYRFTRNQAINATSIAEAGFAATAEHAKSYDCLLALEDTTSLEFTHQTVRKEMGYTTSRKSATGLHAHSVSLFAPKEEQLIGLIEQTRWIRALSQYGKKAQRASRPYKDKESYKWERASQATEARLGSEMNKVISVCDREADIIDYLTYKITHHQRFIVRSMQSRCIEQSPDKLYQFSESLQPADKRNVQVKQRGGRKAREAVCEIRYAPVTLKMPVNKRGESVALYYVSCQETNNDKELSWHILTSEPVTCKEDAHRILDYYEKRWLIEEFHKAWKSGGTRVEALRMQCKENLEKMVVILAFIAVRVHQLRYVGLNKSEAEKQSCETLLSPLAWKLLWTKQEKKKLPKTAPSVYWAYINLGKLAGWYDSKRNGRVEWERLWEGWFMLQTILDGYLLSKSLDL

SEQ ID NO: 8163 - protein, 231 aa, Xenorhabdus sp.
MHTIVLSRTSSQINEGNIQGAVATLALPASQGALKMTLSSLIKDKQVYLPNVLVFDEKFQPVALYASHSFSYQQPGVFSGERVERTLKITPVSGQKNIYLLIYTTHSDLQTSTKMVDPAKAYAQGVGNAVPNIPDPVASHADTGILTLKVTSEEQTTENVLADHSLVDRKPNRVPKSISGETEQHFNEAIKKAIKNGDINKALTLLDEAERLGSSSARETFIKMIKSKGST

SEQ ID NO: 8164 - protein, 425 aa, Xenorhabdus sp.
MRILPLSLPVLAGLFSMQAAAVDFHGYARSGIGWTGRGGEQTCAQSTGAQSKYRLGNECETYAELKLGQALWQQEDKRFYFDTNLAYSAAQKSDHESVNPAFREVNVQGTNLIDWLPGSTLWAGKRFYQRHDVHMIDFYYWDISGPGAGLENIDLDFGKLSLAVTRNTESGGSYRWVSNKNQNTETSNDVFDVRLAALPINSGGVLELGVDYGRANPRKGYHLAKNASKDGVMLTAEHTQSMLDGFNKLVVQYATDSMTSNNNGRSAGASTDNNGHMLRVINHGAINLAKKWDLMYVAMYQNIDRDNRNGTIWYTAGIRPMYKWTPTMSTLLEVGYDNVKSQRTKAINDQYKITLAQQWQAGDSIWSRPAIRLYTTYAKWNEKWGYANKTPGYNDGLAYRDTTAHHFSRGKNDEFTFGAQFEAWW

SEQ ID NO: 8165 - protein, 369 aa, Xenorhabdus sp.
MSSVTLRNVYKAYGENVISRNLNLEIDEGEFVVFVGPSGCGKSTLLRMIAGLEDITSGEMLIAGQVINDVPPAKRSIGMVFQSYALYPHLSVADNMSFGLKLAGIKKSEIQKRVEQVAETLQLAHLLDRRPKALSGGQRQRVAIGRTLVAEPNIFLLDEPLSNLDAALRVQMRIEISRLHKRLQRTMIYVTHDQTEAMTLADKIVVLDAGNIAQVGKPLEIYHYPANRFVASFMGSPKMNFLPVKVSATAVDQVQISLPNGQHVWLPVESKGVTVGSNVSLGIRPEHLLPSDVADVTLTGTVQIVEQLGSETHIHIHISTIRQNLVYLQPDIVLVEEGATFTIGLAPHRCHLFREDGTACRRLYKEPGV

SEQ ID NO: 8166 - protein, 711 aa, Xenorhabdus sp.
MENKSLEDLATEAGIATEYINAYGKPQAIPAQIRHKILQAMEENIPVKKPVSDPSVAALPTVKVLIIGQSFTFTLNTSAQYQWQIQTEQGTNLRGNCQYQLILPASLPLGYHTLSLVPSSDPKDSVQRHVMQIIIAPERCYEPESLIKGSKLWGACIQLYTLRSETNWGMGDFGDLKKMLRELAQRGGAFIGLNPLHAMYPAMPENASPYSPSSRHWLNIIYIDVSQVEDFQSSANAQKWWLMPETQSRIQSVRQTEWVDYSGVMALKMTALRLAYQQFNTRTDTDPLYLSFRQFINQSGKSLYSQAVYDALHDKLYSESHTYWGWPIWPEKYRDPDNDTVQAFCHTNPQEVEFFLWLQWIADRQLADCFRESQSHAMPIGIYRDLAVGVAQGGSETWDNRELYCMKASIGAPPDIMGPLGQNWGLPPMNPHVLQAQNYQPFIQLLRSNMRHCGALRIDHVMALLRLWWIPQGETAAQGVYVHYPVDDLLAILALESQRHCCMVIGEDLGIVPEEIVGKLRNRGIYSYKVFYFERDGQGEFKPPEKYQTQAMATITTHDLPTLCGFWQSGDLKLGESIGLYPDKALLTELYNEREHCKQKLLQSLNHHGYLSESENIANTLTPLQPKTSSSQIPTSVNQGIHYYLASCTSALLGLQPEDWLGMENPVNVPGTTMEYPNWRRKLTVTLEDMFKNTDINNLLEKIDKHRRKVP

SEQ ID NO: 8167 - protein, 819 aa, Xenorhabdus sp.
MKKPQLDKAEFQAALTRQLQRFGLDLAQGVTTHQWWQTISATLLELLPAYRQNNHHQNNHHQIDNLPPTDGSKGKQRHVNYISMEFLIGRLTGNNLLNLGWYDDVQAYLAEYGVALSDVLEEETDPALGNGGLGRLAACFLDSMATINQPAIGYGLNYQYGLFRQSFEQGLQIETPDDWERNTYPWFYRNIQLNVDVSFGGEMVTTTDGGEIWRPAFTLTGEAWDLPVVGYKNGVIQPLRLWQATYDNPFDLSLFNDGQFLHAEQQGIEATSLTKVLYPNDNHRAGKRLRLMQQYFQCACAVADILRRPQLAGRKIQELPQYEVIQLNDTHPTIAIPEMMRLLIDDLQLDWDTAWSITGQTFAYTNHTLLPEGLERWDEHLIIELLPRHHRIIQEINNRFRKTVEKNWPGNQQIWEKLAVIHDNQVRMANLCVVACFAINGVAALHSSLIVTDLFPEYHQLWPQKFHNVTNGVTPRRWLKQCNPALSSLIDQTLGHEWLSDITELKRLEPYAADAAFREAYRTVKQNNKIRLSNYINKTMGLKLDPHAIFDVQIKRLHEYKRQHLNLLHILSLYRQIQENPALDIYPRVFLFGAKAAPGYYLAKNIISAINHAAEKINHDPIVRDRIKIAFIPDYNVSKAELMIPAADVSEQISTAGKEASGTGNMKLALNGALTIGTLDGANVEIAEQVGNDNIFIFGHTVEETKTLLREGYDPKNILQQNKQLQQIMDSLSSGEFSHGDKQAFDLMLHSLIDGGDPYLVLADFASYCAAHQQIDELYRNTPHWTRSTILNTARMGTFSSDRTIQDYQQRIWQVKQVK

SEQ ID NO: 8168 - protein, 374 aa, Xenorhabdus sp.
QTFLHRWQQLDWDDITLSINSKTRHDVEHALNSERLTLNDFMALLSPAALPYLEPLARRAQQLTRQRFGNTVGFYIPLYLSNLCANDCTYCGFSMSNHIKRKTLNEQEVGAECQALKKLGFEHILLVTGEHQKKVGMDYFRHYLPLIHRYFSSVTMEVQPLAQEEYAELKTLGLDAVLVYQETYHEPSYQLHHLRGKKQDFHWRLETPERLGRAGIDKIGLGALIGLSPHWRTDCYMVAEHLFFLQKQFWKSRYSISFPRLRPCAGGIKPASLMNDAELVQLICAFRLLAPDVELFFSTRESPYFRDHVVPLAINSVSAGSKTQPGGYVENDHHELEQFSPNDHRSVQQVAEALVRSGLQPVWKDWDSYLGRQG

SEQ ID NO: 8169 - protein, 255 aa, Xenorhabdus sp.
MLKIADTTFHSRLFTGTGKFANAGLMIEAIRASGSQLITMAMKRIDLQGKDDGILLPLQELGVKLLPNTSGAKTAEEAVFAARLAREALGTNWIKLEIHPDVKYLLPDPIETLKGAEQLVREGFVVLPYCGADPVLCRRLEEVGCAAVMPLGAPIGSNKGLLTRDFLQIIIEQSNVPVVIDAGIGAPSHALAAIEMGADAVLVNTAIAVARNPVKMAQAFKTAIEAGELAHQAGVASQKSHAEASSPLTDFLEAL

SEQ ID NO: 8170 - protein, 70 aa, Xenorhabdus sp.
MNIIVNDQTITLDTPTDNPMTVQQLLEHMQRPQSGTALAINQTIIPRSEWHTHQLSDGDNILLFQAIAGG

SEQ ID NO: 8171 - protein, 260 aa, Xenorhabdus sp.
MRYSRQLLLEDIGPDGQEKLKNGKVLIVGMGGLGSPAALYLAAAGVGHLYLADDDKLHVSNLQRQILYRTADIPAGKAALAAQKLSDLNPLVNTTVINERLDKKSLTNLVRQVDLILDCSDNMATRHAINAACIETGKPLISGSAVGFSGQLMVFEPPYQHGCYACLYPDQEEPQRNCRTAGVLGPVVGVIGTLQALEAIKMLAGLPSYLNGKLRLFDGRKQNWSTLQLTPSPQCPVCGTPPIIDKTAGTDKTVSGTEIV

SEQ ID NO: 8172 - protein, 205 aa, Xenorhabdus sp.
VDSLRWIERLLEAGVRTLQLRIKNLPEDQVEHDIRQAIALGKQYNARLFINDYWRLAIKHRAYGVHLGQEDLDIADLSAIRQAGLRLGISTHDEQELARAKALRPSYIALGHIFPTTTKEMPSSPQGLIALKHQVEITPEFPTVAIGGISLERVPDVVATGVGGVALVSAITKAKDWRQATARLLHLVEGTPDKNVEENNRRRLC

SEQ ID NO: 8173 - protein, 661 aa, Xenorhabdus sp.
MSNAITNDTVTSSTNIIPTTDIAPKAHPARPRKAQRDAAQEFINSIQGVTFPNSRRIYLEGSREDIQVPMREIQVSPTLIGGTKEEPQFEENEPVPVYDTSGPYGDPEAVLDVHAGLQKIRQPWIEERNDTEPVTTLSSDFTQQRLADAGLDHLRFHHCPHPLKAKVGERVTQLHYARKGIITPEMEFIALRENMGRERIRSEVLLQQHPGQSFGANLPENITPEFVRQEVAAGRAIIPANINHPESEPMIIGRNFLVKVNANIGNSSVTSSIEEEVEKLIWSTRWGADTVMDLSTGRYIHETREWILRNSPVPIGTVPIYQALEKVNGIAENLTWEMFRDTLLEQAEQGVDYFTIHAGVLLRYVPMTAKRLTGIVSRGGSIMAKWCLSHHQENFLYTHFREICEICAAYDVSLSLGDGLRPGSIQDANDEAQFSELHTLGELTKIAWEYDVQVMIEGPGHIPMQLIRRNMTEELEHCHEAPFYTLGPLTTDIAPGYDHFTSGIGAAMIGWFGCAMLCYVTPKEHLGLPNKEDVKQGLITYKIAAHAADLAKGHPGAQIRDNAMSKARFEFRWEDQFNLALDPDTARAYHDETLPQESGKVAHFCSMCGPKFCSMKITQDVRDYAAKLEQQSGMEQMSEEFRTHGSELYHRAEDINDVKSV

SEQ ID NO: 8174 - protein, 224 aa, Xenorhabdus sp.
MSQQIAIFDLDDTLIRGDSSLLWTNYLWEKQIITDPRFIEADQKMISDYSAGKLNMQEYLSVSLQALCQIPHEQVDIWLTDFVETTIRPLFYPAAKTQLDIYRQQDIPVIIISATVSFVVKKIAAAFGVNTAMGIDMVMKEGCYTGDIDGIPTFREGKVTRLQQWLAEQNLSPQHISFYTDSANDLPMCFFASEVFTVNPDMKLQSAAEKHGWKQLSWALAPQS

SEQ ID NO: 8175 - protein, 691 aa, Xenorhabdus sp.
VTDKVDQQQDKNNPFFYTSVLPFQAPPFDKIKETDYSPAITAGIKQKLEEVEKIANNPAPPDFENTFIALEKTGTTLDRVTNVFWAMTSANTTDGLQKLSEEMSPKLAAMNDEIMLNSKLFNRIKTIYQQRETLNLDSESLRLVEVIYKQFELAGANLSDADKIKMKALNQEAATLRTQFTNKLLAATKDGALTIKDKTLLAGLSDGEMAAAAQAASERKLDNQWLFVLQNTTQQPVLQDLKDRDTRKALFEASWNRAEKGDDNDTRQTLSRLAKIRAEQAKLLGFKDYASWKLQSQMAKTPEVALKFLRDIVPAATARAEREAKDIQAVIDQQKGGFKVEAWDWPFYAEQVRKARYDLDESQIKPYFELNNVLNNGVFYAANLLYGITFKERKDIPVYHPDVHVYEVFDKDGQQLALFYSDYFKRDNKAGGAWMSNFVDQSRLFGTKPVIYNVANFTKPAPGQPALLSYDDVITIFHEFGHALHGMFADQEYPTLSGTSTARDFVEFPSQINEYWARDPKVFANYARHYQTGEVMPQALMDKINQADKFNKGYQMTELLSAALLDMHWHMLAADKPQQDVNKFEAASLQEDKIHLNYVPPRYRSSYFKHIWGGGYAAGYYAYLWTEMLADDAFAWFTEHGGLTRENGQIFRDKILSRGNSTDLEKLYIDWRGKPPSTESMLKNRGLTEQK

SEQ ID NO: 8176 - protein, 268 aa, Xenorhabdus sp.
LESLPKYFSPKSIMFSDSPAATATDSFSITDVMASLGLASAQARMGIELFLAKQGINKPDEAVESLYQYALTQVHKHSAIAKLDEDVKQSILRILVNYAFQDYARSAASKKLCSDCDDGFIEAEVFSTKTYTPWRERTLVKANLSMGAEIIPSSYAKSREVREVVKVSCPTCKGKGEVSHSCRCNGRGEVLDREKTELQGIPVYKTCPKCSGRGYSRLKFKDVWSALKPLTEVSKTTCYDKYQPLFEHLVTECFKEEDRADSILQKLT

SEQ ID NO: 8177 - protein, 116 aa, Xenorhabdus sp.
VIFTNFDEAQAYARKRRLENKEHYAINQRPQGRLTVGKCGKHRGQRPAWTTRDDERSEFYNITHSKIYKLHPTDAPLILGLLAEGLTQKEVAEKFDVSRSGIATFVRKAKANLRIK

SEQ ID NO: 8178 - protein, 109 aa, Xenorhabdus sp.
MTEKDTEFWAHVWDWLIINAPFLGGMFLAASTAFAREKRDGSGWKASLVEAFICAAISVGIINALEYAQLPLSLAQFFGVLIGFLGTKKIGSILDAVFTFFKNKFGVHR

SEQ ID NO: 8179 - protein, 35 aa, Xenorhabdus sp.
MAKFNGDDDELIDGRYEIDDRYEIGETSRMKTGES

SEQ ID NO: 8180 - protein, 192 aa, Xenorhabdus sp.
MKDIDVRRAVHSKILKEHHKDPDTLVIDEFTMSLGASRADITVINGFMHGYEIKSKSDNLLRLPSQVQYYSSVMDKVTLVVSETHAKPAMEIIPDWWGVKIVTQGARNGVYLHTERHNRLNPSIDKVSLSMLLWKEEMLEILSVLGKDRGLKSKPRRILWNKLAEALDTNELRGFVRVKLKARTNWRVEKLP

SEQ ID NO: 8181 - protein, 34 aa, Xenorhabdus sp.
VYQGWFVLGAIYAIGAIAKAQFQSEQEKRLKEQE

SEQ ID NO: 8182 - protein, 136 aa, Xenorhabdus sp.
VADDICALLADGESLRSICKRPGMPNKSTIFRWLREHQAFCDQYAHAREVQAETLIEETLEIADDCIADPAEVAKAKLRVDTRKWFITKVAPKKYGELVKQEIDHKSSDGSMTPNNIDLSHLSFEQLQALRKNREK

SEQ ID NO: 8183 - protein, 480 aa, Xenorhabdus sp.
MDIDNAMLDEAIEREIARRSLHEFIQYINPEYITSNFSRQVCEALDEFLLDMMNGKRPILILGAPPQHGKSDIVSRYLPAYFFGKYPDKRVAGLSYGKDLASDMNRDVQRIMMSEEYRNLFPASSLNPKRVVTIETMAKRNSETFEIVGNKGSYIAAGVGGPLTGKKVDLGIIDDPIKNAQEALSPTTKNAIWNWYVSTFKTRLSKNSGEIIMATRWATDDLSGKVIEISSKAKVLAFPAINEQGEALVPELHPIEKLLETKIILGDYFWSAMYQQSPKPSGGTIFKEDWVKYYLPKDLPEKFDRVIHSWDMTFKDSEGTDYVVGQVWGKKGANAYLLHQVRERMSFTATLKAVRVLADKFPEGRRKLVEDKANGPAVIDSLKSTVSGLIPVEPDGSKVARAHAITAEWEAGNIFLPHKDIAPWITETVDEITTFPVGAHDDVVDAMTQALRDLYQKKRGFSMNPDIVNQALRPSRTMRR

SEQ ID NO: 8184 - protein, 420 aa, Xenorhabdus sp.
MPTLKENNSVVFDKGSRRRIDANGYLHVSQTHLTKEQVVPYVGREIPGWETLELDPDRLYFGYRPADELEKAKATFNGIPLLYRHEQDSAEQPLKELRVGSIGTTPVWEPPYLDNALTVTDRRAIDAIQDGSLKELSCGYFFEPDFTSGEFNGVAYDFVMRHLRGNHVALVKEGRAGPDVFVHDGKPSQLQEHAMSQENTAPNSAENKGPITQDNPNEAQSTENQKPTEFAIDNDAVKEKMTELGLATDDEAVVQTFISGMQFAHELAEGEPVTVPVGDNGQEKPNPVNDNPPGENTGESKKESPAMDRKPNITMDANTIRHQAVEQAKAHFRALNEAGQKVRSLVGEVDIMAFDSAEAIYAHALKNKGYDPKKYDKSAYKGMVDVLAAQKPSPFTQNPVMDAAPSSLEGPFAGLKNIKI

SEQ ID NO: 8185 - protein, 162 aa, Xenorhabdus sp.
MALQKQVGLYYAPAVPGDRATQNPVIYTQGNPRAEGDITIGHFVFAGTDPFRQVKTATAGKDAPVGFVERLLAYYNYNLISPGTMEIPDQTDVTVAVRGDFWCAPSNQNVTIDQAVFASTTDGSIQTADAKATLDGYVKTGWIVKYYDADSNLAIISNWQTA

SEQ ID NO: 8186 - protein, 343 aa, Xenorhabdus sp.
MRVENPMSNISFEQAKQYGFIFNGARQWITPGSISRLAQDAALITSPNSTVPAELLAYVDPTIIEILTAIRNAREVFSEEKRGDWTTPYMKWRANEVTGNTAAYSDFGHSGTSGTNYEWHTREQYRFQTVTQYGDLEADMASEAKINLAADKQRAAATIIDIDSNKFYLLGVKDREIYGVLNDPNLNPAIAAAPVGEKSSTKWADKTTQQRYRDILNLFARLVSQTGGLVSERDELILTISPSARVLLGDATDFNVSVMKMLETYFSNLKLVSLPQLGGPSGETIQLIAPKVAGMETGLLGFGEKMRAGRIVPDLSSFSQKFTATTYGAVIRIPAAIAQMTGI

SEQ ID NO: 8187 - protein, 117 aa, Xenorhabdus sp.
MSKGKTVSVRLNHPHGIEFPMPDGSSVVLKGNAFYLFGQEKGKLPVGLFGETRVDADKWDYILTHYGEMEIFKNQLCVWDEKTTSANDKASEKKELRHGREPVDTSKTATEPVKEST

SEQ ID NO: 8188 - protein, 137 aa, Xenorhabdus sp.
MAIVTFDSGAFLELYPRFAGVLTKGQLQQAFDVACLLLDNSDNSAIPYEPDGTQERKTLLYLLTCHIATVTLWGNNGQAGPAASATEGSVSVSFAVPDAANASWFKLTPCGQMYWQATRKYVVGGQYSAVKHYHPWG

SEQ ID NO: 8189 - protein, 154 aa, Xenorhabdus sp.
MKGGDKIRAALALLAGTQSIEVRAGVLAGATNEKTGEPIAPYAAANEYGTRNIPPRPFMRGTIANQSDEWGRVLGAQLRGRIQESGGIEAAFETVGKIMADDIKDSIEQSLPPPNAPATVARKTKKGIASPDKTLVDTGSMQRAIDYEVIKGGE

SEQ ID NO: 8190 - protein, 124 aa, Xenorhabdus sp.
MSVSHVFAVPVLENKVLRSKILEERKKLSTCLVEHVKQEAIGTQKEATKIASEAVELCSEYFQSVEDVNVEAFKATYSEPDYEDIVEWLEAMKEGNIFKNKNIMLGEMAATVIMVRKKHARDNP

SEQ ID NO: 8191 - protein, 64 aa, Xenorhabdus sp.; identical to SEQ ID NO: 5554

SEQ ID NO: 8192 - protein, 119 aa, Xenorhabdus sp.
VMHVLFERDIDYTANYYHHEASTITAQRSVELSMQLDFYGEEADSRARVVANLWQSSYTTAQLEKCQPLYSEAPRKMVLVNEANQYENRVMLEVKLQYNPEITYSVDNTDSFSLDLNSI

SEQ ID NO: 8193 - protein, 485 aa, Xenorhabdus sp.
MNTIPASDIVSVLPGVVGTGGNPLALNALFITKQTPSAMLGVKAFGDAEQVADIFGTKSKEHEAAQVYFAGFVGSTARPETLYIASMMTSDQPAKLVGSKMPVRDFNHVPQGLALEIDGKRQVVTITPDNIKSYSALAETVSASLAKAGVCKYDSGSRTFSIEGAKKGSDGTIGFGTGDLADYMGLSEDTGAQKNDGINADTIEELLPRITKETSNFVSVMALGNFSTDERIAIAKWVTLQGDRYLHVLYSDSSEKVVLEVISNTIIESDIGGTYLMFGDHTHGAFVCGYPACLSFDELNGRTNFAFRRQEGLKPSVNDKALADELLRLKFNFYGAYGTANDRFIFAYPGSISGKFKWLDSYVNQVYLNSQLQLALMTMLANFKSIPYNDNGAAIHRAAIKDPIDQMLNFGAIQRGIALSEQQKKQINNEAGFDAATQIKTEGWCLRIGEATAQTRGLRRSLPLKLWYADGGSVQQVTLPSINVQ

SEQ ID NO: 8194 - protein, 56 aa, Xenorhabdus sp.
MESRYIDIIIEMPSIKKRYTGTGGLISLTGGASGKKLLDGTSYKFNMVTNGAEEIA

SEQ ID NO: 8195 - protein, 137 aa, Xenorhabdus sp.
MSLLNSKTITIESGRDAGKTFVITEMPIVKADDWAMRALFTIANGGVDIGDIRPEMGMMAMAHVAIKALANIRAEDGIPLLNELLDCVQIVPSGGNARAIEFNADIRDVKTLFLLRKEALAIHIDFFTQGGGSDLSS

SEQ ID NO: 8196 - protein, 55 aa, Xenorhabdus sp.
VNVSSVVFQVVTAGYANYHELATIYGLEAAMNLIEIGQASEYNKRLKEEMEGKHP

SEQ ID NO: 8197 - protein, 138 aa, Xenorhabdus sp.
VYKGEDGKLAIRDGNYFCDMYPAYIFKDAQNLKGFPSGYFPKAMMNVSTDEDGKYIGVDLHPGMAFDTRPSGSWGYVNASLGTGSRSPSEVTYYVARDDSNFAYVIGTEKAGVIAALSSSDAFSPVNAVLGKCNRMGE

SEQ ID NO: 8198 - protein, 48 aa, Xenorhabdus sp.
MLKTKYQQLFDLPDSEARYLGHRVREAFVALESEEPSIVSDSDCSIPD

SEQ ID NO: 8199 - protein, 157 aa, Xenorhabdus sp.
MTITYNDIREKTAKIKEEREARINLIYSEAFALIEAYKHSLGLKKDDVWFNLNGEPQPYVMTGLLGDEQFQKLPLTSIELTPEYHLKFIIGTVTDDTPRGGCASLVEIELFVDGHQMTAKVGAESKKFPIFDGDRANICDAIKDEVMMMINDANLRR

SEQ ID NO: 8200 - protein, 819 aa, Xenorhabdus sp.
MNSFASDANKATRALDDLDKKAGGASTAVVKLSDGVNEAAGSTTDFEQSNQKLAKSTDNVGKSAKNTSNVVLNFSDNIKGTTEKTQDWDKAINGAVKALAGLFTTIFVSTGLTKLIGEISSANDKIYFLSKNLGMSAETIKKWQNAAEQTGGSADGMAATMSGLNKSLWDLVTVGDAQVLTYFNALEVAVMDSQGQLRSLDDILLDMADSMSKMPRPQAYNIGKHMGLDDGTINLLLEGKEAVQKRLDAQKNLVISTKEELELNRKLQDQNAVLSQQWEGLKTLVANYLIPRLLKLSQMVTGFLEYLNRNREAAISVFKGVAMVIGVALIPMAIAAGSALLAMFAPLFTGIGLIALFATAMWGVYDDYQTWKKGGDSFWDWSKAHETLIWVMEKLEELEMWFKGTTIGKWFTDTNGELDLLKMAFAGFATYIAVSWVGKILKAFAKVGRGIKGIGKQAAKVGNKAGKLGAVGRVGAVGLAAGAAYASVDYVDAVLNSVFGEYDWFQRFRTAPNWKYAGMAAIGQGDARWVNGEWVDNRGKGTGHHITPTTLDIPTGDPDLDRRKRKVQRGEMTLDELNGVAPNANKLKGQAALNAMRGYFMELEKREGLPAGWLYGVAMAESSGNRFAIGPQTKYGKAKGPFQFIPPTAAEYGLKGDDVFDWYKSSDAAAKMYGNLSRKFKGNEDKMLAGYNWGEGKMERNGMENMPKQTRNYIREVKKYREKELQDRKAQGIVQSLSDFQARMNQPIIPNMDMSAPHEFLAQTERIRSMPMAGATNNVKVDLNGDINVTTTANTVTGTVTDAGEAARLSLSQIMTSMG

SEQ ID NO: 8201 - protein, 49 aa, Xenorhabdus sp.
MPMGGTTNIKVDMNGNVNVYSNSDTVKGTVSDGGEAIRTSLSQLVSSMS

SEQ ID NO: 8202 - protein, 212 aa, Xenorhabdus sp.
YILNEKVLSESPEKVNALAAKVREIRSGEKQVYAKVRECFKISASDYNPSSQEVRTFYALLQDKFHHAVTGMTSSKLILDRANHREDNMGLYSIAGTFPTKKEIETGKNYLRPDELYRLHLLSEQFLLYAEATALQGKKMTMSSLHTQLDRLLTLNDYDVFPGYQDYLKDTALDHARQELERYKKKKVIEDAGYIYDEELVELGEYHFLFEK

SEQ ID NO: 8203 - protein, 35 aa, Xenorhabdus sp.
VQKLLKKGQPSFVEYVVCGSGGFMSLMNLSVPAGK

SEQ ID NO: 8204 - protein, 130 aa, Xenorhabdus sp.
MVIQAEEDKERLLLENKGLEDQVAEMTPDVKAFERIAKSNGSMCVTDAAKHLQIKPKALFDKLHSMKWIYRRAGNKNWIGYQDKLQQGVIEHKVRSFTDDEGQEQTREQVLVTAKGIAKLAKMLNLEEVA

SEQ ID NO: 8205 - protein, 157 aa, Xenorhabdus sp.
VDSGDERSMFNVGKTICSLDELKTQYQERRETIDLLANEISDYYLNLLSLDESQVRGAMIQNDLEMNKACETTIKGFEQGLKAMLKQNRPDEEKQEIRLYLKSVAKARFEIVRLNDFSRQLFTLPTIYKSDINKAALSELAAYTTKKIESENYSFTG

SEQ ID NO: 8206 - protein, 238 aa, Xenorhabdus sp.
MDAGISLGGAALINTLFGNYWGIFNQYGIPLLLADSVISLQYQNQYRVVSAPIENGSFASYNKVGEPYKVTVQLSKSSGGTLERGVFLSQLEILAKSTLKFHVVTPEFVYINAAIVGYDLAREAKDGTTLIKVNVHLEEVREVKIKYDKEEVKNPDDAKKKDTGDQTQKVESSSSPGSLTKMAKELGELNKDGNMSKVKVTVEGAKIIWRGMQGIGSDLSNMQAQAENMVNQIDKRSF

SEQ ID NO: 8207 - protein, 217 aa, Xenorhabdus sp.
MMTIEAGEEGEALSQVFRGGITFAYPDFGDVPNASLVIESQTAVLDKMQGVNAESYEGEHDVAAIIATICQRMGYTFESNGVSVKVSDPYLHNTDIDKIRQLAHAANLDVYIEDKNVAITYKDSPRRTLKIPVISPETGLISYPIPTNLGVQFKCFYDPLVRFGGIVRITDSLIKICNGDWLVFGIRTTLETEQDSAQWAMEVSASRRGGNYAAIKK

SEQ ID NO: 8208 - protein, 98 aa, Xenorhabdus sp.
MADSLYLGGLLNGTPSQFIHFLGSGIDIVSTGIVNVKATKIVLDAPVETTSTIQAKSNITDNTIINSQSMAGMREIYNRHTHLEHGQGSNTSPPNQKA

SEQ ID NO: 8209 - protein, 95 aa, Xenorhabdus sp.
VASDQYARAQSVANACRVFVKDLYYSQGDGIPYLEEILGKNRYSLAMYRKYLEDAAMSVEGVISATAELSTANDRVVRGRILFTDINGTKGAIEL

SEQ ID NO: 8210 - protein, 358 aa, Xenorhabdus sp.
MNTPQGQLVTTLTAIITDERNFFIHLLNSFDPRYADGLMQDALGYIYFLQRKQATKSVAEITVNGLVNAVIPVGFQVADNAGRTWSTQTEATIGDDGLVTVHVYCDVIGRIEAAAESINRIVKAIAGVDSVINKQAAIVGKEAESRQEFELRRQQSVAVNAKNTNAATQGAVGNLKGVIDCYVIDNPSNETKTVGFTNYPLIRNSIAVSVVGGDDNEIARHILSKAGSGCSFMGNNTVKYEDTESFPYMPPVYDIKFIRPHHIPVEFIITFEDKLKLTHQDKEATRQAVMNEFTTGRGKGRIAKKLIASDYIYVVAQAATERLIAVQVARKGEAVANYLEFGIDEFPVLSVDDIRIAS

SEQ ID NO: 8211 - protein, 418 aa, Xenorhabdus sp.
MPVTAGGLPPSGRDFNGILNQISENIVYLSQGGKFKYSQEYADSTGGYPKGAILQSDDETREFQSLVDNNKINFNKESSEKVNAAWKQVSTTQLLDELNKKLNRSDVVQSVGNCKAQVMSQNATTDALNTKQDKGDYATNTALNQVNDNANSRLEKAKNGADIPDKAAFVNNLGAYPKTGGTIEGKVFTTSDVDVAGWIGGAKLYERHDTGGWAQVYSEAHKPKPEEIGVYSTKEVDDRFAYKISQDTFTCGNLHVNATHDWAGVVLKKPSGYSTTLAANPDNSESMLTVRYRDNKNNTLNYIDFPKKTGTVALTSQLLGVDQIWTDVMSVRSNDTWYVNDTGKPITVYVESQKTDKRTGPFSMGGEVDNYRVGYFWVSTNSIHSFSFIVPPGSRYIVKAGWGVTLTPDAIVRWVELR

SEQ ID NO: 8212 - protein, 116 aa, Xenorhabdus sp.
MKYYKSKDNQVHAFTSDGSQDAWIEPDFILITEKEARAITNPPPTPEQLQQQAVYEKQYLMDVAKDKIAVWQDAVDLDMATKEEKAALLKWKKYRVLLNRVDCSTAPDIVWPEQPE

SEQ ID NO: 8213 - protein, 345 aa, Xenorhabdus sp.
MHENKQTKNTSEFTEIPSESGKFKPSRFSVAPMLDWTDRHCRYFHRLLSKEALLYTEMVTTGAIIHGKGNYLAYNEQEHPLALQLGGSEPQALAQCAKIAQERSYDEINLNVGCPSDRVQNGRFGACLMGDATLVADCVKAMQDVVDIPVTVKTRIGIDEQDSYEFLCDFIGTVVQNSACDNFVIHARKAWLSGLSPKENREIPPLDYPRVYQLKKDFPQLTLSINGGIKTLEEAKQHLKHVDGVMIGREAYQNPSILAHVDRELFDQNAQVTNTVDAVKALYPYIEQELSNGTYLSHITRHILGIFQGIPGARQWRRHLSENAHKPGSDIMVVEKALEMVTERM

SEQ ID NO: 8214 - protein, 136 aa, Xenorhabdus sp.
MSKKPISLKQALHRASLGISLFTFITQKAKDEHCEINLNNLIALAHGIHQEVYRDLSKHAPQNPVNKLVNCLVRRERDPLGQSSFRAGLCTSLYEVILEQASQHCSEELHDLLSLACDINQEVYYSLYAAVNGEDA

SEQ ID NO: 8215 - protein, 91 aa, Xenorhabdus sp.
MEGVAGMNNAKNDWHQADIIAALRKRGTTLAAVSRESGLSSSTLANTLSRPWPKGEWIIANYLEIHPSEIWPSRYFDSYGELIERKVRDRS

SEQ ID NO: 8216 - protein, 294 aa, Xenorhabdus sp.
VKTFFLSLQDEICKQLERLDDHSHFIEECWQREEGGGGRSRVLKSGKVFEQAGVNFSHVTGDSLPSSATAHRPELAGRSYQAMGVSLVIHPQNPYVPTSHANVRFFVAEKEGEPPIWWFGGGFDLTPYYGFKEDAVHWHTVASTLCQPFGEDIYPIYKKWCDDYFFIKHRNEPRGIGGLFYDDLNSPDFDTCFNFTQAVGNGFLSAYLPIVERRKDIGWGERERQFQLYRRGRYVEFNLVWDRGTLFGLQSGGRTESILMSMPPLVRWEYNYSPEPNSPEEELYTSFLIKKDWI

SEQ ID NO: 8217 - protein, 60 aa, Xenorhabdus sp.
MLGIFGDLPAGISDGVALVCEQNRTDIRVNGGNEVIGDSSDINHFSPLKYKKAARGGIRY

SEQ ID NO: 8218 - protein, 130 aa, Xenorhabdus sp.
MLGWDQMADDTRYLMNIGLINPDAVGFSHDGYYTFRTDFMALTAKGFDYANVDTIGGELNAVTIKIHKNTLEQIETIIMSANLPESEKKTLLRLVKEKGAESVVGKCVDTLFANTGTVSHVLSELAKSVL

SEQ ID NO: 8219 - protein, 124 aa, Xenorhabdus sp.
MTYAGNDYYMDIRAGKIYGIYDVPKNNSSDVDGYWFNCSAPVTAIVTVVSVTPDERTVETFKVKDSDGNYETYDISPIYKDIPQYAYNYIRYLIKQDAKIKLTSRGCGSGLYPTFVSAESIKQS

SEQ ID NO: 8220 - protein, 103 aa, Xenorhabdus sp.
MPIVLAPSWISITNKGIDFLRADGGLGAILNVNIVKFHDDTLEALSSYIDRLNTSDSEKNALKTELKKLPVDGLRHIMTKVIDTALTNPSEILNVISSAVSQG

SEQ ID NO: 8221 - protein, 66 aa, Xenorhabdus sp.
MPDELKEALTKRAKKNGRSLNSEMVMILQSALDDDSQPKKIDELAQLEADKFKAALLETLKKMSHE

SEQ ID NO: 8222 - protein, 59 aa, Xenorhabdus sp.
VNKLADTHGRSANAEMVAAIEHWVNMDHVVPANELPDIIQRLAKVESQLEKLTKKNEKS

SEQ ID NO: 8223 - protein, 122 aa, Xenorhabdus sp.
MPPELREALEQKAEKSKRSLQQEVIYHIDMSLQIEKLFAATSSDDIYTRIAKALKSESESKKKDEDIEKLKMQISLLHGITKDTDTDRFMKISTQVKIAQEALDNITKHIPPRYEEPIKTKK

SEQ ID NO: 8224 - protein, 86 aa, Xenorhabdus sp.
VLALNTNLLKLESPTFKERANILSEVQKRMLPVATALGLDYDATVLDEYIDLMHQMADAIENDDTDELQKIVRILDKKPFICQEFI

SEQ ID NO: 8225 - protein, 342 aa, Xenorhabdus sp.
VGVKASGKYIYRENRTFGKQAHAKTWGAMRVAELEQNGIPTQNDTEGLTVGTLLYKYINDPDLGGKAGRTKKYVLNMLLDCDLASISLSDLSVNHIINHCRYRRESGASPTTINHDISYLASVLKSAKPVYGINYISNPASDARPTLIQMGLIGKSQRRNRRPLQDELDKLIEGLRRRSDHREGKIPYEDILNFSILSCMRIGEVCKIRWDDIDKKQKAVLVRDRKDPRKKVGNHMSVPLLGEAWNIAQRQPRTSELIFPYNPKSVTAGFQRVRNALGIEDLRYHDLRREGASRLFEAGFSIEEVAQVTGHRSLNVLWQVYTELYPQSLHEKFNKFMHQKAE

SEQ ID NO: 8226 - protein, 327 aa, Xenorhabdus sp.
MAKHIIFSATGGPEVLKYSEFTPVDPAPDEVQVENKAIGINYIDTYVRSGLYPTASLPSGLGTEAAGIVTKVGSNVSYIKIGDRVAYAQSGLGAYSEVHNVPANKLTILPDTISFEQAAASLLKGLTVYYLFYQTYKILEGETFLFHAAAGGVGLIACQWAKALGAKLIGTVGSDEKARLAQNAGAWQTINYNRENIVERVLELTNGQKVDVVYDSVGQATWLDSLDSLAPRGLMVSFGNASGAVTGVNVGLLNQKGSLFLTRPSINGYITTREELAEASKTLFDFIASGKIKVDVPENQQFTLSEAVRAHQILESRATHGSSLLIP

SEQ ID NO: 8227 - protein, 59 aa, Xenorhabdus sp.
MATGAKNAKSQSITVRVLHELIEGMAQTKEHNESTGQFVSAAMRAEIKRRQRKAKTSSE

SEQ ID NO: 8228 - protein, 299 aa, Xenorhabdus sp.
MINWMRNHASPAHGSENSVQAEEVFGLALILQKNLFEAEMPDPGHSPSGLFDPIKSSKLSEGNEEILKDQIRSFKPGDIRLTFGFLLDMICKGESPSHENASTLFPVVWERANEDLMKSAGQRYHSYLVDPSSDTSHDKGAKIRVLETLVKVKGIKYIPDAARASLYRHAVKQLAKAKDTSYGWSDEEKAAKALAQFGPHIPSIAFEDVYQEILAVWCGNYWGSSTAHITLKPFIDALNSNQLMALARMFKDNERANIELFQSKPNAKAKALLDDIQGKLTIQASIDEIDQIKDLIDEM

SEQ ID NO: 8229 - protein, 101 aa, Xenorhabdus sp.
LTDYILTEAAEADLRAVISYTRQHWGEAQVRRYVEKLENAMARLAAGQGSFRDMETLFPGLRMARCDHHHVFCLPRVNEPALVVAILHERMDLLARLSGRL

SEQ ID NO: 8230 - protein, 66 aa, Xenorhabdus sp.
RNDWHQADIIAALRKRGTTLAALSRETGLSSSTLANAFSRPWPKGEWIIANYLGIHPSEIWPSRYF

SEQ ID NO: 8231 - protein, 153 aa, Xenorhabdus sp.
YLTLNGKKQGLISAGCSTLDSIGNRYQKGHEDQIQVLSLNHAISRQQNVSHQPIQFIKPIDKSSPLLAMAIDSNESLNGGFIFYRTSQTGQLELFYEVKITEATITDISCVYPHSINDHDIMPYEKVILNYKSISWNHVTAGTSAYSIWEDRI

SEQ ID NO: 8232 - protein, 78 aa, Xenorhabdus sp.
MPQTSTATSSSKRPYRKGNRLTGIERQQAFIARRKAANDKSIRVYVSNELKLQLQKMCKVEGVSQGEMISRLIERASA

SEQ ID NO: 8233 - protein, 103 aa, Xenorhabdus sp.
DQQLLNAAEEVKNGKFEADLGGGVIKKRIAVDRKGKSGGVRVIIFFKVNHHLFFADGWTKNTVSSRGAKEIEDDELEAYKQLSKLFLSYTDQKINELISYGIL

SEQ ID NO: 8234 - protein, 65 aa, Xenorhabdus sp.
MEELYRFAEEFLPSLKISKNAIRYYADIVEQYAAYRLRRLGKYQQWLYALCFIFHRYQQITDMPG

SEQ ID NO: 8235 - protein, 65 aa, Xenorhabdus sp.
VYKKMVFEGVPEEILEKFARISPIAWQHLFFTGRYSFKKASKTSIDVAALAELLEQHLKQAFWKS

SEQ ID NO: 8236 - protein, 162 aa, Xenorhabdus sp.
MIKKYDGKTATIDKPLLIQDDYIHLLLVNNDGQVIDQGGSKLSLNGIAVGDKIMWRTVSLSKYNTPNSVMLSNYKSNNASPLIEVPVLNKFKRLRPIVVNTDPIDIVAQEIPGYYWSAEVLEAGGLYEQIYNATFVIYDNKAKPYKYFVWNHIVSLGDIKNN

SEQ ID NO: 8237 - protein, 251 aa, Xenorhabdus sp.
VGVIPTLELTKEGYVMTVSARLEKIEFAEGVNATFIGYKASKEYHQSRVELALPDIWSINDDTNWSGFYVGQTIEVAEGYLPDHATWGESGVFLNAIYLDRNIAENFPITERPLEYVILEGEELSDPQKSKDEKYAYVVNALLNDLDIDVPHGPLIHNLGLMGYIYKGPLVTDESETQIEIIVPHTITQYGALSARTDTIYEFLNYEIVESRVMSPNNLTADQELVTPSPIDPSIIVTIGSETFYPWKDEL

SEQ ID NO: 8238 - protein, 68 aa, Xenorhabdus sp.
VLGKSEIEERRYHVANALASQRLEGIEPDRQTLEDLNLFASGELELADVLSRLQERTLNSVKMSRFKG

SEQ ID NO: 8239 - protein, 84 aa, Xenorhabdus sp.
MSRLSIDITERQHQSLKAAAALQGKTIRQYALERLFPGQDEDSEAWLELKAMLETRIQDGLDGKVSKKSVNEILEEELAREKRR

SEQ ID NO: 8240 - protein, 312 aa, Xenorhabdus sp.
ARLSRTLKSHDWRRDRALIALRQKGYTPYSERKNPHYVPKPMRISTRSESREALTSLSLAFVANADFFPGHDYLFEVMVPFEFIAKAMGVLHEYDNGRKSYDVALHALSVLEQLEQIVVHRDKDRDAGQNKPVRIWLKPEFFMSKGIPCDEIRRSLIDFQNWAIKSGQLENLEKKYQRHLLNMVRLGIDIESKHALRQLLKKIKRSVVAPDLQEQKAEVLKQIEDSIELLDRKKSKNLEAELDRTQRSVDNLRKKDKSDSIYWCMFVEWQKTTTPVAVYYAKTKLKAQYPHVNEYSEQFYRLLLEQEGIILT

SEQ ID NO: 8241 - protein, 102 aa, Xenorhabdus sp.
MLELAKELHAVDAAPKSLVNDLKKAVNARKINDQIKTVTMMTGAEIKQLRTQYGMSQSVLAMALGMSKESISKWEREEKKPSGPALRMLRILERRGPEILLV

SEQ ID NO: 8242 - protein, 173 aa, Xenorhabdus sp.
MMMERIQPGVTLTESIITTGQQEIPSAVPVFIGYTSRNQQHAKTTVRIDNLVEYTRRFGDNYLMAFAVRHYFDNGGQQAFVLPLQGNMPSENITQTEAETLMAALSSKAVQEAISAETQITLILAPDIARLNDNVIDDQQILSNLWSEVWMVLLQLSQTRSNLFRVPPKNPQK

SEQ ID NO: 8243 - protein, 244 aa, Xenorhabdus sp.
MAGDNFIRSYKERMAKKQDNEQAILRFLKDEIYSTAEILSQVLHYTAVSTVYAVLKRMCAKGLLSTEKVDLGGYRPFNVYGITQHGAVMALEEHDDPFKLKAFEPSKITLSTLEHRFDVQRLSLVARHRGYQWKSTSHIKLEKGQKYPDGLMRKDGKIWAVEVERVAKSPKRYREITEIYLNQIAKNGWAGVVYLFPEPLLRDRVKRIFYAVDAATVGGRLQSLTPEITDRFFCFNTYEEFARE

SEQ ID NO: 8244 - protein, 247 aa, Xenorhabdus sp.
MCDDEEYYVVLTHGEMVDAVKNSCGSNPNSSWKDSLFSVTDVVTTYAGNILDGYAFMRLANELSSNFGVKVTEYVNRYGHKMVKLTGHAGVRKFLTATKYKASHWKVIDIGIGTQAMRDGIATVSRRVIIVSVLYRSAEMLFRDEYDIYDFFGNVTMDVAKTAVGALVGFLIVAGAAIFLEAGAFALGVAVVALGFGVITTLLLSKLDERYEISKKLINYLREKELAEADKLDYRKQPFGYPYPRIK

SEQ ID NO: 8245 - protein, 312 aa, Xenorhabdus sp.
MVSLALDYFADHLPRKPYHTDDLLYGLRINNADVAKLARYIQHNPPHAAFWFVFDVDRVGAAIDWTDSNAPAPNITVKNQTNGHAHLLYGLQTAVRTAPDASLKALKYAASVERGLCAKLRADVNYSGLICKNPLNQHWQVTAWREEVYTLDELADYVDLSFSEARRSDFEYGLGRNCQLFEKTRRWAYRAIRQGHPHFDQWQLAVIQRVEMYNVQLTNPLSLPECACIGRSIAKWTHQRMSEKAFAQYVADTHTPEIQAIRGSKGGIAKGKNNADKRELALTLFANGISRKEIAEQLKVHRNTIRNWVMHK

SEQ ID NO: 8246 - protein, 281 aa, Xenorhabdus sp.
VSKLSHEIYRFYQSHDWLFNVVTAEWSTVCCVGFVLSLILANVRGFLGHMGLVGLSAEQLRRARELNRGADGKRINLTGAQKANLDHPPKGLYFRRRCYQFAEFFVLLLCGAAVLFYGINVGALMLVNDKAIINLLLSEARFYPLFWLIGSVVVGSVTANLTHFLFLRDFLAKKDAEVNRRVIESRSKHQGRTGELSDARSLQFASVPDFNPTDYFALAMANDAVFLGLDEQRRPITLPRQIWVKSNIQIMGSVGSGKGVLACSGSAEEPPKVTILSTVTP

SEQ ID NO: 8247 - protein, 96 aa, Xenorhabdus sp.
TAYDQLQASALRSAYSWKLLELLMRFESTGWAEYTIDDFSTSMDATQKQRENFANIRRKIIEPAVKELTEKDGWIIEWKPVKAGRKVARLRFDFRD

SEQ ID NO: 8248 - protein, 80 aa, Xenorhabdus sp.
MLQRQRTMQSMADFRPGDVVSFQTDGDEIIGILVRLNKKSVTVHTENGNHWNVAPQLLTLVKRPLTLEDEVEKTISKSIH

SEQ ID NO: 8249 - protein, 186 aa, Xenorhabdus sp.
DIFTMRTFGYARVSTSQQSLEVQVKALKAEGVRADRIFTDKVTGSSLDREGLQMLRLKIEEGDVILVKKLDRLGRDTADMIQLIKEFDERGVAIRFLDDGISTEGTMGKMVVTILSAVAQAERQRILERTNEGRLEAKAKGVKFGRKPTIDKAQVRHLHEQGIGATNISRQLKIARATVYKILATV

SEQ ID NO: 8250 - protein, 120 aa, Xenorhabdus sp.
WFNMRSASGMVFKIPGKSRSVLEDDGAAEMLDGPDPLPIRGLSGNVDVHFGAAGAVPGDRIVGIMEKGKGITIYPIQAPALQRFDDEPERWIDVRWDLDEANKSRFMARVMINALNEPGT

SEQ ID NO: 8251 - protein, 28 aa, Xenorhabdus sp.
MAGHSKWANTKHRKAAQDAKRGKIFTKI

SEQ ID NO: 8252 - protein, 135 aa, Xenorhabdus sp.
AICSAKELESNPESAIANAYDMVINGYEVGGGSVRIHRNEMQQAVFRILGITEEEQQEKFGFLLNALKYGTPPHAGLAFGLDRLVMLLTDTDNIRDVIAFPKTTAAACLMTEAPGYASSAALEELAISVTKKESE

SEQ ID NO: 8253 - protein, 190 aa, Xenorhabdus sp.
SRYELEPLRQVQSLQQRLEMALDYFFAQKQRSFNGLHHRLQQQSPDLRLARQQNRLSELRQKLIDGLLRHLKQNSAASEKLIQRLLQHTPEQEIRHYSQHIQQIDFRLRQAIERQLSRYKEKFAVSCSRMEAVSPLATLSRGYSISETPDGKLLKQVKQVKVGDSLKTRVQDGWVESQVTQVQKASKRKK

SEQ ID NO: 8254 - protein, 54 aa, Xenorhabdus sp.
MNDITSQTLQKISKEALDDIKKTLDDLSILVKDIVKTLQDANVISAHTGKIISA

SEQ ID NO: 8255 - protein, 283 aa, Xenorhabdus sp.
KHCDMEITHVIRGEDHINNTPRQINILKALNAPVPEYAHVSMILGDDGKKLSKRHGAVSVMQYRDDGYLPEALLNYLVRLGWSHGDQEIFTVEEMTELFSLDAISKSASAFNTEKLLWLNHHYINTLPAEEVAVHLAWHIEQQGIDTRTGPELVDLIKLLGERCKTLKEMASAGRYFYEEFAEFDADAAKKHLRPVARQPLEVVRTKLAAITEWTPENIHHAIQATADELEVGMGKVGMPLRVAVTGAGQSPSVDVTIHAINQARSLARIDKALAYIAQREAQ

SEQ ID NO: 8256 - protein, 166 aa, Xenorhabdus sp.
ETITIQELSQRMSERAVDVIKFLMKEGQMMKPGDVIDADLAELIAVEFGHTVKRVSESDVEEGIFNQTDDEGEMLPRPPVVTIMGHVDHGKTSLLDAIRQANVVAGEAGGITQHIGAYQVEKNGQKITFIDTPGHAAFTAMRARGAQATDIAVLVVAADDSVMPQT

SEQ ID NO: 8257 - protein, 97 aa, Xenorhabdus sp.
VMIEADRLVSAEILQDDEAVDRAIRPKFLSEYVGQPHVCEQMEIFIQAARQKGDALDHLLIFGPPGLGKTTLANIVANEMGVNLRTTSGPVLEKAGD

SEQ ID NO: 8258 - protein, 153 aa, Xenorhabdus sp.
LYRPGYGMAVAQAQYPVHDITAKLREKGIKVRFGIHPVAGRLPGHMNVLLAEAKVPYDIVLEMDEINDDFAETDTVLVIGANDTVNPAAQEDPNSPIAGMPVLEVWKAQNAIVFKRSMNTGYAGVQNPLFFKENTQMLFGDAKASVDAILRAL

SEQ ID NO: 8259 - protein, 54 aa, Xenorhabdus sp.
VFAYPFNISGQSAISLPFGWSVEGIPIGIQLVGRYGDEATVLQVSAQLEYAMPW

SEQ ID NO: 8260 - protein, 176 aa, Xenorhabdus sp.
MNGTNGTVSVSGQMDVLDNYGSINAGDGTNSLNAILIQGPSGPYAKRPHGQIDTILNQPGASIDGISVITSTLNLLHNLGRLESQKNNSLSTLATFVIDAGSNVGIFNNDGSVIGPNHGVLIRGGGYLETLNNKSGSITAEQDAIQVTGQGMAFVEANPSIRPSKIKQILMLACYM

SEQ ID NO: 8261 - protein, 256 aa, Xenorhabdus sp.
KKYLAVRLAVDYSGRNTFMKYTNPRFYDSDMKKGSETVDARFKALWQPLDSPWLAKLTYFHTAAKNSDAESASLPYRNLKSMTLGINRSKTISDVGIFDLQYDFDNDIVLSNQLQYSASKYRYTFTKMLPGIANRDSNNITNETHLNFGDEYSIWSGVTGLYYSRDKASNVLNNVLGKAHSDLTNTSVGLFSEGTTRFAGKWALSAGLRYQYDQVKHEGINSYVPGVYHEYSKGFHAVLPKVSLAYDITDDVTVGA

SEQ ID NO: 8262 - protein, 269 aa, Xenorhabdus sp.
SPAIFKALISLKTRNGIIFSPHPLAKNATNKAAEIVLQAAVAAGAPKDIIGWIDEPSVELSNALMHHPDINLILATGGPGMVKAAYSSGKPAIGVGAGNTPVVIDESADIKRAVASILMSKTFDNGVICASEQSVIVVDSVYKQVRERFSSHGGYILQGKELKAVQNIILKNGSLNAAIVGQPAIKIAEMAGISVPENTKILIGEVTVVDEKEPFAHEKLSPLLAMYRGKDFGDAVGKAEKLVEMGGIGHTSSLYIDQDNQAARIKYIL

SEQ ID NO: 8263 - protein, 42 aa, Xenorhabdus sp.
SGDDMEALAFAWLAFRTMFGLSGNLPSVTGADRETILGAIYP

SEQ ID NO: 8264 - protein, 217 aa, Xenorhabdus sp.
MSEHNDTHIAELRREYMRGGLRRKDLTEEPMALFELWLKQACDAGLSDPTAMCVATVDEHGQPYQRIVLLKHFDNRSLVFYTNLGSRKAKHLAQNNRISLHFPWYQLERQVSFLGKAERLSPLEVVKYFHSRPRDSQIAAWASQQSSRISARSILEGKFLELIHKFQNGEVPLPSFRGGLRVEFDSVEIWQGGASRLHDRMLYLREGYEWHIGRMAP

SEQ ID NO: 8265 - protein, 190 aa, Xenorhabdus sp.
MKLQQLRYIVEVVNHNLNVSSTAEGLYTSQPGISKQVRMLEDELGIQIFARSGKHLTHVTPAGEEIVRISREVLSKIDSIRSVASEHTYPDRGSLYIATTHTQARYALPPVIKGFIERYPNVSLHMHQGSPTQIAEEVCKGNSDFAIATEALHLYSDLIMLPCYHWNRSIVVTKDHPLATKQNVTIEELL

SEQ ID NO: 8266 - protein, 103 aa, Xenorhabdus sp.
LMNLVLAVFIGGGIGSVLRWFISLRLNHISAPIAVGTLTANCVGAFIIGLGLAYFSKATHIDPVWKLLLTTGFCGGLTTFSTFSAEVVYLLQAGKISWRWVTF

SEQ ID NO: 8267 - protein, 208 aa, Xenorhabdus sp.
NEPIKLAQTIQDMGLRYVVITSVDRDDLRDGGAQHFADCITAIREKNPSIKIETLVPDFRGRMDRALEILTATPPDVFNHNLENVPRMYRQIRPGANYEWSLKLLERFKEAHPDIPTKSGLMVGLGETNEEILEVMRDLRKHGVTMLTLGQYLQPSRHHLPVQRYVSPAEFDEMKEAALEMGFTHAACGPFVRSSYHADMQAKGMEVK

SEQ ID NO: 8268 - protein, 313 aa, Xenorhabdus sp.
AVGIRTIALFDMSARQLSEEQHPVLENSQQEVDQRIISVIEDFISRNQRRNRELIAISIIVPGLVDPHNGIIRYMPHIKVDKWPLVQNLRNHFNISCFIGHDIRSLALAENYFGATRDCEDSLLVRVHRGVGAGVIIKNNILLNKRGNLGEIGHIQIEPLGERCHCGNFGCLETVASNPAIEAKIQHQLQQGFPSKLTLDKCSIHDICRAANQGDSLAVEVIRQAGHNLGKAIAIAINFFNPQKVVIAGDITEAEQSLLTAIQNCINTQSLKNFREDLPIVVSELNHCSAIGAFALTKRAMLNGVLLQHLLGG

SEQ ID NO: 8269 - protein, 130 aa, Xenorhabdus sp.
TKRDRSLTRLGITQWVLRNPAALRGELSVLIPDSTRLLIITHDHIDLSHSLLVDIFTAMGIDASLVYCITTKDVELLSESIRCPCWLLGGDITLSIQGISLRNPALKDTSLDGDAQRSLWQQIYHYEKNF

SEQ ID NO: 8270 - protein, 193 aa, Xenorhabdus sp.
RMLGLPPKLATLIACGNSICGNSAIAAAAPAIGAKPEDVAASIAFTAVLGVAAVLLMPFLPQLLGLDATQYGIFAGLTVYAVPQVLAATAPLGAIAVQTGTIVKLIRVLMLGPVIATLSVIHGQSGKGRLKLQQMVPWFIIGFVLMIMARSFGLIPEVLLSPVASLSNILTIMSMAALGLSVDIRSLRHAGGK

SEQ ID NO: 8271 - protein, 127 aa, Xenorhabdus sp.
PFAQSRNVDGIWLDDGERLKEVALPPSGPLTLDGWTRRGRGDVYRLKVKAGQTVKIELAASSEFVLMAVFDFSTPDEDAIFFSDSGGKIATLTPKADTEWLIRPTLILGSPRRGLGAHYTLTVSTGK

SEQ ID NO: 8272 - protein, 213 aa, Xenorhabdus sp.
FHVPIALLMEGELDKGALEKSLSTIFERHESLRFRFYKENNNIFMQPDENMKVNLQVIEALPREIKREEISIEINRLWEEKLRTPFDVYNGPLIRTFLLPVSEKVTILLIDVHHIISDGWSVNIIMNEFKKLYTTYSQGEGNTLPPVPMQYSGYVYDLQDLHATEEAKKQIKFWQQQFSDVNSDRDFPAPFRKHLASKYRYCSRHIKIPNSLL

SEQ ID NO: 8273 - protein, 107 aa, Xenorhabdus sp.
LSRVMTFHFVCLAWVFFRSPTLNDAFMVLGQLFSGDILASLLSSSALLATFWALFIAYPLLVKIRNSMERNSRHISWLYYPVPLALVLTLVFMLSPSGMPGFIYANF

SEQ ID NO: 8274 - protein, 230 aa, Xenorhabdus sp.
MSIRRESNERMADFAVADVSLFWLLNALNSAEPVLAELLANPTRHPELLYRELVRLVGSLLTFSLEHQPDDIPAYQHLSPGTVFPPLFALLNELLEASLPSRVIPIELAKNGQFWKGDLNDSRLREEADFYLSVRSSLAAHLLQTQFPLLCKVGSPDEVANVVNVALNGVPLKALSHVPAAIPMRLENQYFALELNNLSAKSMLDSGHCAFYVPGTLGDVQLELFAVLRS

SEQ ID NO: 8275 - protein, 134 aa, Xenorhabdus sp.
MVCQLRNGVSIENGKALYRRACEQIDKTRESLEQAGFSKSAVEHMSYAQCALLDESVMNRGVQDEGYIQWLQSPLQTKYFNTLEAGDKLWDRIRTVLHEPAPDPAVLICFHRVVTLGFSGKYQTPENDHRGDVL

SEQ ID NO: 8276 - protein, 180 aa, Xenorhabdus sp.
NGTLTDNNGRKADFRNVILVMTTNAGVREIQRKSIGFTEQDNSIDGMAEIKRTFTPEFRNRLDSIIWFDSLSAEVIQQVVDKFIVELQVQLDEKGVSLEISTDARQWLCDKGYDKAMGARPMARVIQDSLKKPLANELLFGSLVHGGSVRISLDKDKSALKYDFKSVQKSNKKKSEDAVL

SEQ ID NO: 8277 - protein, 239 aa, Xenorhabdus sp.
RPLKAESYRYWTERKPQFQGANDFSALLSHSIDLTQVKTVEKPAAQLLTLKDSTYHQLKEICRTQGVTLNVALQFAWHKLLHSYTSDEQTIVGTTVSGRDVPVEGISDSVGLYINTLPLMVQWDHTDSVATVLQAIQQDIAALNSHSDLALSSLQSDGERLFHSLLVFENYPVPAVSEDMAGIEHTLTFRKAVEKVDYPVLIMAYEHDNKLVIKFSYGEDWLTEEQAQHLLCQLERSLL

SEQ ID NO: 8278 - protein, 240 aa, Xenorhabdus sp.
PSKVVNVGDVVEVMVLDIDEERRRISLGLKQCKSNPWQQFAETHNKNDRVEGKIKSITDFGIFIGLDGGIDGLVHLSDISWNVAGEEAVREYKKGDEIAAVVLQVDAERERISLGVKQLAEDPFNNYLSVNKKGAIVNGKVTAVDAKGATVELADGVEGYLRASEASRDRVEDATQVLNVGDAVEAKYVGVDRKNRVINLSVRAKDEADEKDAIASVNKQEDANFANNAMAEAFKAAKGE

SEQ ID NO: 8279 - protein, 205 aa, Xenorhabdus sp.
MGFDGKIALVTGASRGIGRAIAELLAERGARVIGTATSENGAEAISAYLGDKGKGFVLNVTDSESIEQALSNIRAEFGEIDILVNNAGITRDNLLMRMKDDEWQGIVDTNLSSIFRLSKAVMRSMMKKRYGRIISIGSVVGTMGNAGQANYAAAKAGVIGFSKSLAREVASRGITVNVIAPGFIETDMTRASQTNNERAFYRCSL

SEQ ID NO: 8280 - protein, 262 aa, Xenorhabdus sp.
VQRAPQEELNKRWKPHLPLWPVFVVIGGVGHHQEGKNPSVMPGHSLGEYSALVCAGVIEFQQAIKLVELRGKLMQEAVPEGKGAMYAIIGLDNESIAKACEESAQGQIVSPVNFNSPGQVVIAGEKEAVERAGAACKAAGAKRALPLAVSVPSHCALMKSAADQLAVALQSVEFKQPQFPVINNVDVKTEESADTIRAALVRQLYNPVRWTESVEYIAAQGIDNLLEIGPGKVLTGLTKRIVGTLSAVAVNDVSSLTIALNK

SEQ ID NO: 8281 - protein, 85 aa, Xenorhabdus sp.
PDLSVTSTGPAYIMYTSGSTGLPKGVIVPHRAVVRLVINNGYADIKSDDRIAFAANPAFDASTFEVWAPLLNGAALVVIDHTTLL

SEQ ID NO: 8282 - protein, 94 aa, Xenorhabdus sp.
VNSAFIRPEWLVVDATVSFTYDDVSVFAVLDELITELKRKRITLVLAGRSTELKNWIKQNKLRSSDEDLIIVPDLYFAIRLIQSKKQAEESLAE

SEQ ID NO: 8283 - protein, 245 aa, Xenorhabdus sp.
MPITANTLYRDSFNFFKHQLLNIVILSVLAALVTTLLNHLLIPDGEQLKLLTDMQDTLRESGNSGIKNVIEQLTPEAQLMLMRTAGGILFSNIFGDTLLTASVLILISAISNGHQANALQACQLSLTRLPKMFLLVLICTLLVQVGYALMFVPGVLFSIGFAFAPILLLEKSKGVFASMQASWRLAFDNFRLLIPAVLLFLAMKLIVVFGLSKMPEIALLTVNNLLSAILLIYLFRLYMLAKPQN

SEQ ID NO: 8284 - protein, 145 aa, Xenorhabdus sp.
MLITLTDVTKNNYEAVCDLSVTDEQLSYVAENVYSIVQSKFNPSYQTRAICLNGEPVGFFMWVPDADRRITIWRFMIDQSHQKKNIGRKALALAIDEIGRTDQLKEIAISYNPKNLIAKNLYASVGFVEVGMDEEVGEMLAIIRI

SEQ ID NO: 8285 - protein, 98 aa, Xenorhabdus sp.
IREQYRYWRLHIMLSLYVGYGLFYFTRKNFNYAMPELISDLGLDKAEIGLIGTLFYITYGCSKFISGILSDRSNPRYFMGIGLIATGIINVFFGLSSS

SEQ ID NO: 8286 - protein, 213 aa, Xenorhabdus sp.
CSKDGSGIGGLGLIEENHRTLLSAGPRKVSPFFVPSTIINMVAGHLSILYGLRGPSISIATACTSGVHNIGHAARIIAYNDADIMLAGGAEKASTEFGVAGFGAARALSTRNDDPKTASRPWDKDRDGFVLGDGAGVVVLEEYEHAKKRGAKIYAEVVGFGMSSDAYHMTSPPEDGAGAALAMENALKDAGISSEQVGYINAHGTSTPAGDLA

SEQ ID NO: 8287 - protein, 319 aa, Xenorhabdus sp.
  unsure (1)..(319): unsure at all Xaa locations
NIPETQKSHGYLAGGFMQENTFQFKASLAQKRLWLHEQLEQKSAIYHITTALVLEGHLDIPALTQAISDMVERHESFRTGFVYQNGSLYQCCHESVSLPLVTVDLSMLSEEEQKQRLQRDSQQPFDLQQAPLLRFTLYQCGTEHGEERHYLVMVLHHIISDGWSAGIISRELTTCYNARRQGKFPELPELSIQYIDYSEWQHDQHENAESAESLVWWKEKLSGIEPIALPFDHPRPSRLSLRGKTHCFALSPELTQALDQQARQQNKTLFSTLLSAFYLLLYRYSGQTDLVVGSPVSGRGQLELEGMSDLCQYTVYGLX

SEQ ID NO: 8288 - protein, 99 aa, Xenorhabdus sp.
KGELTEFTTGAVFSRNGSIFEDDGKPRTTFADIDGDGSKELIISKLTAGSGNYLEVDALKITDKDVKLLTRINTNSTNNIIRLLRNHCKKEQCLKQKQR

SEQ ID NO: 8289 - protein, 116 aa, Xenorhabdus sp.
VLSLSFFSYAAHTNQDKIAETYCDVFGKASVEAFKTHDSPDVIAQNALNALYKKGLTLKEIQSNKSEFIATIKQTVAEVREHKPKFPSNHHFDETLAKSVKDCKVQIKNVLSQHAR

SEQ ID NO: 8290 - protein, 153 aa, Xenorhabdus sp.
LTKICPCGSSLSLAHCCGPYLDNHRPAPNAESLMRSRYSAYVTKNIDYLIATWHPDCKAETWRSEIEQSFVGVEWLGLNVISVDKGLHNNEAYVEFSACFIEQAKQDRQLIHERSRFLRIEQHWFYIDGIRPQTGRNDSCPCGSGKKYKKCCS

SEQ ID NO: 8291 - protein, 107 aa, Xenorhabdus sp.
MSAFSLSDLERIVATRAAASPDESWTAKLVAAGQERAAKKLGEEAVEAVIAAIAKDRDGLKNEAADLLYHLLVVLKIADIPLSDVFAELERRTGQTGLAEKAARPTS

SEQ ID NO: 8292 - protein, 106 aa, Xenorhabdus sp.
  unsure (1)..(106): unsure at all Xaa locations
MNVTAGSGERGMPGTLDHFRPDEYSPYHFFSSEEWSKFRADTPLTLSADEVKRLRSLDDPIDLDEVRRIYLSLSRLLSSHVEASQLXXXXXXXXXXXXXXXXXXXX

SEQ ID NO: 8293 - protein, 141 aa, Xenorhabdus sp.
DSRGNMVTNRQIILSRLPQGKLSADHFEIRETERPVPAEGEVLLRTLYVALDAASRAWMHGATYRAGLASGDLMAGMSLAEVIESRSSNLAPGDLVFTETGWQVFAVVPAQTLTKLPRIEPLSHLVSIYGVPGLTAYFGLL

SEQ ID NO: 8294 - protein, 164 aa, Xenorhabdus sp.
  unsure (1)..(164): unsure at all Xaa locations
XXXXXXXXXXXXXXXXXXXXXXXXXXXXLSQSPLLSNGKIDRKAGQAPTIGQSSIQRQNPVPPLGEQEIKLAAIWQSLLHVGPIGRDDNFFALGGNSLQAIRMIAQVWEQTGLKLHFSDLFRQPTLAQCAAMLHASEQPEEKTADLHTXSFEQQGIYSDSTRLS

SEQ ID NO: 8295 - protein, 132 aa, Xenorhabdus sp.
ALEDAKIIYNLPFNDLLFRAQQVHRRHFDANAIQMSRLLSIKTGGCPEDCSYCSQSARNPTGLKASKLMEVERVLAEARKAKEGGATRYCMGAAWRNPKERDMDAVVAMVEGVKALGMETCMTLGMLTPEQS

SEQ ID NO: 8296 - protein, 155 aa, Xenorhabdus sp.
LPMHGFHMDNGILEERVLLPRKGAPETFDVRGFLDIVSAVRKGGQEVLVPVFDRSREIAIASARAIAPETRFILAEGNYLLLNEAPWTALSESFDLTIFVGPSVAVLEERLRNRWQGYGLDADAIHAKLFKNDLPNGKRVIENARSADIRIDIWE

SEQ ID NO: 8297 - protein, 31 aa, Xenorhabdus sp.
VPYEHGHMAGNDTMKCYGNDLHCLENEVPTG

SEQ ID NO: 8298 - protein, 172 aa, Xenorhabdus sp.
  unsure (1)..(172): unsure at all Xaa locations
VGLGKPFKPHQIGRGNGNALFFSRLRHELAGEIVLYRLELQLAVGSGLFLGKQFADHFRRQKRRCFLHGGEPVACNRAIVENVEIGVPRPSHPVGIGEGIGNPPQDIDLAAGQQSRIVGSRIHHRRILLEIGRIDEPLASLGKGKHARQVVRRLPAGFRLLPVGNRLFYLGX

SEQ ID NO: 8299 - protein, 178 aa, Xenorhabdus sp.
SFRDWIMRSKTMVIQKLFHARPRAEFTDMFHVNAWGIPFSALIVGAKLVMPGANLDGASLYSLFESEGVTIAGGVPTVWMALLDWMDANARSFSSLQRIAVGGSAPPLDMINRFQSRNIMVRHAWGMTETSPIGLVSAKLPKHQNLSSEKQALNLTKQSRPIYGVEIRVDRADGKPIP

SEQ ID NO: 8300 - protein, 163 aa, Xenorhabdus sp.
  unsure (1)..(163): unsure at all Xaa locations
GEPPGVVPRRGKALVPYLSRFQPARMKATSIPLVFVLVILPFTWIAALVLLLAMPTIPLFMALIGWQAKAASEKQLAETGNMNAFLLDRLRGLETIRALEAVDLTAGRLSADAQNLKKRTMAVLRIAFLSSAVLELFAALGASLSAGYIXXXXXXXXXXXXXX

SEQ ID NO: 8301 - protein, 179 aa, Xenorhabdus sp.
RLAAPAMPGFDTLGTLKMLGERGSGHSWFILTKAIIKKEFALSGSEQNPDLTGKDVRLLLKRLGKEPPGPVRAFMERGEDFAVRDTLDELVAAMNAISGDDRLDIGHIRQQIEARDREIGNGFSKDAQVTAIHGARRYLGDRLMRTAKPHRLLDPAMGPLIAVRLHVLTRKTLGGLHTL

SEQ ID NO: 8302 - protein, 60 aa, Xenorhabdus sp.
  unsure (1)..(60): unsure at all Xaa locations
XXXXXXXXXKCSKAVQVDVKLALGDRYLWARITPWAREALNLRGGQWLYAHINLLRKSHL

SEQ ID NO: 8303 - protein, 198 aa, Xenorhabdus sp.
  unsure (1)..(198): unsure at all Xaa locations
MXAFLASVDESLKKLKTDYVDLLLLHWPNEAVSLAEQIGALNAVKEAGKVRHIGVSNFNTALMAEAVKLSKAPIVTNQIEYHPYIDQDVVMAAAREAGMSVTGYYGMADGKVFADPVLKEIAAGRGKSVAQVVLRWLVQQQGVVALSKTVSEARVDENLAIFDFELSADEMAAIRALARPDGRIVSPDGLAPVWDQAA

SEQ ID NO: 8304 - protein, 225 aa, Xenorhabdus sp.
  unsure (1)..(225): unsure at all Xaa locations
IIMSPAIGTPIEDMTLAEENGMPAILVARSMDGVDMPTYRGDDSYGISLATNHLISLGHRTIAMVGGTDQTSTGRDRYQGYVNALRKAGIEVDPNLRIPGPRSKQGGFEAAVHFLSLPQKPTAAVCWNDLVAIGLMNGISRAGLVPGVDISVTGYDDLEEAAIATPALTTVSNGQAEVGRLAARALLDRLAGSHEPDGIHLIKPEMRIRQSTGPVRXXXXXXXXX

SEQ ID NO: 8305 - protein, 138 aa, Xenorhabdus sp.
RIRRTDLTQEVSQQTFERMKSERLAEAELIRARGNEEAQRRRAIADRQVVELESDARRQSEVLRGEGDAERNKVFGEAFQRDPNFFEFYRSMSAYANSLNGNGTTLVLSPDSTFFRYFNNIDGAAPAAPAAPAPAPAN

SEQ ID NO: 8306 - protein, 235 aa, Xenorhabdus sp.
  unsure (1)..(235): unsure at all Xaa locations
XXXXXXXXXXXXLFAGVYLIGRSITRPATAITGAMRRLAEGETDFAVPGLRRKDEFGAMAHALEIFRQAAIAKIELENQALAARQQAEAEKARFQREAEAEAQARLMQATTGLAAALHRLAAGDLSFELNEPFAPDFEALRHDLNRTIRQLDAAMSGVVQSSVAIDGGSQEISQSAADLARRTEQQAASLEETAAALDELTANIRISAERAVEARTVAHSADEDASRTADLVVXX

SEQ ID NO: 8307 - protein, 75 aa, Xenorhabdus sp.
  unsure (1)..(75): unsure at all Xaa locations
MARLLGVEQPLDLGNGLGRAEIQRLVENEPAGNRAAFGFAVLLFAWFGHASVLFVVFFVRRSKIALHFGRAQKRX

SEQ ID NO: 8308 - protein, 51 aa, Xenorhabdus sp.
MDGRKIYEFTVTWGEQRTTDDLEGEVVESSDQRPDEQAIREILPNYTGVIL

SEQ ID NO: 8309 - protein, 95 aa, Xenorhabdus sp.
VSVEKRDLFRRPLMVSELKNYDAVVFDPPRAGAEFQCKELARSAVKKIVAVSCNPLTLARDLAILTEGGYRITRVTPVDQFLWSPHVEAVAVLEK

SEQ ID NO: 8310 - protein, 95 aa, Xenorhabdus sp.
IYFIPDVMRVFTLVTTISAILFMFIWSMILCSYLAYRKHRPELHKASVYKMPFGNVMSWVCLAFFAFVIVLLSLQADTRQALIATPVWFIILRSG

SEQ ID NO: 8311 - protein, 195 aa, Xenorhabdus sp.
  unsure (1)..(195): unsure at all Xaa locations
SFLHRIENRIETDHHDMGFLYSPSCIAAWKLVGDEDGRRAALMAADQLMERFQPVGQFIQAWGRRDNPNEYRYIIDCLLNLPLLYWASRETGWAXXXTVALAHXXPXXXXXXXXXDSTYHTFYMXXXXGAPVRGVTKQGYSDESYWARGQAWGIAGMAISYRYERLPAYRGTXXRXXAFYLKRLPDVSFRAHGXX

SEQ ID NO: 8312 - protein, 160 aa, Xenorhabdus sp.
ARDHARKLISKGKTVKIIRVGKKGYDSLRRELAANFIKRIELRDVKRVGFENADQIAKKVISLFIAGEFDVCTLIYSEFKSVISQIPTGLQLIPAATPVVEEDEATQNAVYEYEPDAASILEDLIPRNISVQVFRAVLENVAGEMGAKMGAMAGCNAQCR

SEQ ID NO: 8313 - protein, 138 aa, Xenorhabdus sp.
FQSGEGPVNMLLYTLGLDPADMPGWAADRHWAMVTVILFGVWKSMGYYMVIYLAGLQGINSELYEAAGLDGANAWQKFIHVTLPQLAPTTFFVTVMLTIQSFKVFDQVYMITQGGPGTSTLVLVYHIYNEAFISWDLG

SEQ ID NO: 8314 - protein, 142 aa, Xenorhabdus sp.
  unsure (1)..(142): unsure at all Xaa locations
MRPWRFADETLEELGGGDGAGQTTRAVLHVGEFGIDDLVVILAERHAPQLFSRHLARICKARGQFIVIGEEARLQIAERNRDRAREGGEIDHEFRVEAFLGVPERIGQNQPALGIGIDDLDGLAGHGGNDVTGALGXXXXXX

SEQ ID NO: 8315 - protein, 174 aa, Xenorhabdus sp.
AQRPGDIVTSMSGQTIEIINTDAEGRLVLADALWYTKERFNPKFMINLATLTGAITVALGNLQAGLFSNDDELATRLADAGEVTAEKLWRMPLGKDYDKIIDSKFADMKNSSGRLAGSVTAAQFLKRFVGETPWAHLDIAGTAMGSPLTEINQSWGSGYGVRLLNELVRAHYED

SEQ ID NO: 8316 - protein, 153 aa, Xenorhabdus sp.
  unsure (1)..(153): unsure at all Xaa locations
MLGTKSSSHAVFYGAPYPAAATFEAAEIQTSISEKTPSAFLRGQFALKRTMDIAGASIALVALAPVLMTVALLVKLDSRGPVLFSQVRWGMNGRKIRVYKFRSMRAELGDATGVAQTVKNDPRITRIGAVLRRTNIDELPQLIDXXXXXXXXX

SEQ ID NO: 8317 - protein, 53 aa, Xenorhabdus sp.
IVDVIRILIAILLPPVGVFLQVGLGLHFWLNILLTLCGYVPGIIHAIWVILRK

SEQ ID NO: 8318 - protein, 60 aa, Xenorhabdus sp.
MEMLKNHTTSAPVHGWIEGIDMTPEDHYPMHCNENQWNTSAEKAASASGKGGVMADHAPI

SEQ ID NO: 8319 - protein, 199 aa, Xenorhabdus sp.
KVATGIDIVKAQIHILEGAAIGTAESGVPKQGDIRLNGHALQCRITTEDPEHNFIPDYGRITAYRSASGFGIRLDGGTSYTGAVITRYYDPLLVKVTAWAPQPDEAINRMDRALREFRIRGVATNLTFLEAIIGHDSFRNNTYTTRFIDSTPELFAQVKRQDRATKLLTYLADVTVNGHPETKGRAKPSDKAAKPVVPY

SEQ ID NO: 8320 - protein, 133 aa, Xenorhabdus sp.
  unsure (1)..(133): unsure at all Xaa locations
VHGDDTALAGFPRSRQHGLDLDRMMTVIVEDLHAVGFACQREAPLDAAEGRKPLLDVGFRNAETVGDGNRRRRIRNIVAAGHRQDEVLEGEYLAGAATADFHVKHRARAVNAHIRKTHVRLRVFAIGDDLXXX

SEQ ID NO: 8321 - protein, 217 aa, Xenorhabdus sp.
KVITYGENPQAHVRFSNVRIDGTRSVFDVEIRRRRTGKIFSFKDLVLPMPGRHNVSNATAAIAVANRLGISEADIKKGLASFGGVKRRFTLTGEANGVQVFDDYGHHPVEIKAVLAAAREACKGRIIAVHQPHRYSRLSSLFDDFAHCFNDADTIILAPVYAAGEDPIEGASSEALVSAIKAAGHRDARFLEKREDLASQVAAIANPGDFVVLLGAL

SEQ ID NO: 8322 - protein, 55 aa, Xenorhabdus sp.
IRGVIAVGNTNFGAAFASAGDIVSRKCAVPFLYRFELLGTEEDVVNVKHGLERFW

SEQ ID NO: 8323 - protein, 138 aa, Xenorhabdus sp.
MQSTEEVISPDFLRRLAAVAARETLPRFRLPGAVVNKIAGGFDPVTEADRETEKALRALIRSEYPDHGILGEEFGNEGADAGLVWVIDPIDGTRSFISGIPLWGTLVGLTRDGDAVAGMMAQPFIGELFYATGNGAYL

SEQ ID NO: 8324 - protein, 43 aa, Xenorhabdus sp.
MPKITRTVLEDVTKLMIGDPSLPFESPARLYVTRHGRFIRDFV

SEQ ID NO: 8325 - protein, 27 aa, Xenorhabdus sp.
MTAPPKKRGMVLGIYATGLAVGFAVGP

SEQ ID NO: 8326 - protein, 147 aa, Xenorhabdus sp.
MTGWISKLAGIVCLSAMALIVGISAVRAASVSPQAWSAYKDAFLDPGGRIIDTGNGNISHSEGQGYGMWLAVLSDNIADFELIWSFTRTELLVRDDGLSAWKWDPRTRPHVTDINNATDGDILIAYALALAAGQWNRQDYAEAFAAI

SEQ ID NO: 8327 - protein, 69 aa, Xenorhabdus sp.
DGVLMIEASRFRSQERNREDARERLKELILEAVAPPPPVRKATKPTKGSVERRLKAKSGRSDIKKMRGK

SEQ ID NO: 8328 - protein, 240 aa, Xenorhabdus sp.
  unsure (1)..(240): unsure at all Xaa locations
XXXXXXXXXXXXXXXVANIIANPKIKISGEEVDASKITPELIESLHEAGDVEANVTTGYHAIEFLLWGQDLNGTGPGAGNRPYTDYDKAKCTNGNCDRRADYLKSASTLLIKDLQEMVDAWAPEGEATKTVEADPKAGLTAILTGMGSLSYGELAGERMKLGLLLHDPEEEHDCFSDNTYNSHLNDAIGIASAYTGEYTRVDGTKMTGASLAELVGAKDKALNDEMXAKLNKTLDAMHVM

SEQ ID NO: 8329 - protein, 164 aa, Xenorhabdus sp.
VKLGRFGWKAQNASVRDQSASAFSHDIGISTPDAPNAYGDCTDAQKDCLAMPTGVQARLGPVEAPDPVLDLVTFYTENLAVPQRRNAGDATVLRGKQLFYTSGCTACHTPKFVTRRDASDPMHSFQLIWPYSDFLLHDMGEALADGQQVGEANGRQWRTQPLWL

SEQ ID NO: 8330 - protein, 112 aa, Xenorhabdus sp.
HMFLDGLEDAYDKGRLMGTFAEDCAETYQFTRAMQDDYALASLERARRAIAEGAFEAEIAPVGDVAVDEQPGKARPEKIPQLKPAFRDGGTVTAANSSSISDGAAALVLCVA

SEQ ID NO: 8331 - protein, 183 aa, Xenorhabdus sp.
ENAMRSNTWDTSCEVYAAEEMSLLEAAYEDAELQEFDYALADTHGGSSELNNTIIASSNLLLIPTMLTPLDIDEALSTYRYVVELLLSENLVIPTAVLRQRVPVGRLTTSQRAMSDMLVNLPVVQSPMHERDAFAAMKERGMLHLTLLNTTNDPTMRLLERNLRIAMEELVTISELIGDTLGN

SEQ ID NO: 8332 - protein, 160 aa, Xenorhabdus sp.
  unsure (1)..(160): unsure at all Xaa locations
ETSYGFHKVDEGKKQGLVNEVFHKVAKRYDIMNDVMSAGLHRLWKDAMVSSLSPRKDASYKVLDVAGGTGDIAFRIVEASNRLAHATVLDINGSMLAVGEERAAKKKLSDNLTFVEANAEELPFEANSFDAYTVAFGIRNVPRIDAALKEAHRVLKRGGX

SEQ ID NO: 8333 - protein, 214 aa, Xenorhabdus sp.
  unsure (1)..(214): unsure at all Xaa locations
VLSVRQKRAERSLPADGQPKTILLLPGSRSTETTRLMEPFQQAAKAFVERNGPTRFLLPTVPRQENRIRELAATWPEEIRPQIGADPAFKWNAFAEADAAIAASGTVILELALAGVPTISVYKTDWIFTMLSKRVKTWTGALPNLIADYAVVPEYFNEVVRAGSMLRWAERLSHDTIERRAMLEGYALVQRRLQTDVPPGEAGXXXXXXXXXXX

SEQ ID NO: 8334 - protein, 173 aa, Xenorhabdus sp.
LEYLSRKGKLELQRSARHLDTFVPPDEIRELALSWVQETGTYHESRPDEERQQELTTHIIVSFPAGTSQVAAYAASREWAAEMFGSGAGGGRYNYLTAFHIDRDHPHLHVVVNRRELLGHGWLKISRRHPQLNYDALRITMAEISLRHGVVLEATSRAERGISERPMTFAQYR

SEQ ID NO: 8335 - protein, 85 aa, Xenorhabdus sp.
RLEPEAIRQALVKLEGWSLREDGAAIVRSFKFSSFAEAFGFMAESALAAEKLNHHPEWSNVYSRVKVCLTTHDSQGVTERDFLLA

SEQ ID NO: 8336 - protein, 147 aa, Xenorhabdus sp.
VFDRFQPDLVVLSPGPGSPTDFDCKATIKAARARDLPIFGVCLGLQALAEAYGGELRQLAVPMHGKPSRIRVLEPGLVFSGLGKEVTVGRYHSIFADPTTLPRDFIITAESEDGTIMGIEHAKEPVAAVQFHPESIMTLGQDAGMRM

SEQ ID NO: 8337 - protein, 32 aa, Xenorhabdus sp.
MNEAFEPLALLGHDLRIIYALFAQARFQRLTG

SEQ ID NO: 8338 - protein, 119 aa, Xenorhabdus sp.
LALLCREKAIDWSRITAFHMDEYIGLEAGHMARFANWLDRYLFSHLPFGAVHRIEPHRFASPEACATDYACRLAAEPLDLVCLGVGINGHLAFNDPPEARFDEKETVKVVTLAQDCRAQ

SEQ ID NO: 8339 - protein, 145 aa, Xenorhabdus sp.
MPGPDVLALATKLSAAEIYLGVTPEQLGPWRAYTTALIDLVSPGPERNPLPPMPGEGKAKPEPRLAGEELAGIIAQKAEKAKALQDAVAALKPKLSPQQVLKLAELERALMPPPPPGPRHGPSEEGRLPPRHGDMRPPVPEMDRG

SEQ ID NO: 8340 - protein, 232 aa, Xenorhabdus sp.
  unsure (1)..(232): unsure at all Xaa locations
XXXXXXXXXALKAGEISLRIETRKLSTTFLDGCEQPIDTAREPVAAGQLVKLLEEIGGETFEARSRSGRVLSARYVAGSDAAVMISGGQHPNETTGIVGAIRAARKLAERKGAHFTISPLENPDGYALHQRLRVGNPRHMHHAARYTALGDDLEYRTPENSGAHLNEKEIRFKAQEMSGARLHVNLHGYPSHEWTRPLSGYVPRNXXXXXXXXXXXXXXXXXXXXXXXXXXX

SEQ ID NO: 8341 - protein, 97 aa, Xenorhabdus sp.
RSGNIFSAKELADLAQAGAVDDISLRFFDRQGKPVKTPLDDRVIGLPLENLSNVDRVIALAGGSKKTEAIAGALRTGVIDVLVTDKFTAERLVGKET

SEQ ID NO: 8342 - protein, 75 aa, Xenorhabdus sp.
ALPSIMAGVNQSLMMAFGMVVIAGIVGSGGLGETIYGSIRTLDIATSINGAIAIVVLTMVLDRITQSAARIGAGR

SEQ ID NO: 8343 - protein, 134 aa, Xenorhabdus sp.
  unsure (1)..(134): unsure at all Xaa locations
MAKVARRLRGSRSSHQWKLRVRFTLHGTVLGRGLAPPFRESATAMTPLAGSRLRVILIVLCCGLILSATVLLGLSTGARHMPFGTVFDAIRGRADDEASLIFWDIRLPRVTLATLVGAARPFPXXXXXXXXXXX

SEQ ID NO: 8344 - protein, 114 aa, Xenorhabdus sp.
MVCSQGTGYGLVMPAQVLSELGGQEIGADRLGPYGEVALECFGEVLGDVDAILLIDFGNGGANQLSAEPLWQRLPAVCAGHVHLINGNCVFGSLYTARYLAEGWRRLFARAQPQ

SEQ ID NO: 8345 - protein, 92 aa, Xenorhabdus sp.
  unsure (1)..(92): unsure at all Xaa locations
MDESAKADRLLPNGDFTATGRRYLIDIDRRSAEAGLRANFDTGPVSHDVTLSVNGYRADRSSATTRVLSVTQSNIYNPVFXXXXXXXXXXXX

SEQ ID NO: 8346 - protein, 164 aa, Xenorhabdus sp.
NIGADYKEALTEPGGWTIGMTAFGEMLPYHENRVKLDQDKKDKWGLPVLSMNVEMKQNELDMREDMVNDAVEMFEAVGIKNVKPSRGSYAPGMGIHEMGTARMGRDPKTSVLNGNNQVWDAPNVFVTDGACMTSASCVNPSLTYMALTARAADFAVSERKKGNL

SEQ ID NO: 8347 - protein, 51 aa, Xenorhabdus sp.
PVWQLGMGGGAGEESYPQRPDEVDCTYYLRTGFCGFGSRCRFNHPRDRAVV

SEQ ID NO: 8348 - protein, 294 aa, Xenorhabdus sp.
  unsure (1)..(294): unsure at all Xaa locations
MLLAGAVLAATTVLAGIGLLGVSGWFITATAIAGLLPATAYAFDVFAPSAAIRLLALSRTAARYGERMTTHEATLSVLAALREKLFRGFAAPQAAKNLQARPARLLNRLTADIDALDSLYLRVLVPAAVAVLAAVATGIGLAFLDPLAGILAALFLVAAGLCIPVRSALKAEKFSRRRAVGLEALRARTADLVNGQAELLTTAXXXXXXXXXXXXXXXXXXXXXXXXXXXXXXXXXXXXXXXXXXXXXXXXXXXXXXXXXXXXXXXXXXXXXXXXXXXXXXXXXXXXXXXXXXX

SEQ ID NO: 8349 - protein, 66 aa, Xenorhabdus sp.
MQDADNDNGAEKPRRLSPAAERALKEAEERRRQKADLQLPPETGGRGGAEPVRFGDYEIKGRAIDF

SEQ ID NO: 8350 - protein, 164 aa, Xenorhabdus sp.
  unsure (1)..(164): unsure at all Xaa locations
XXXXXXXXXXXPGYSRLIDRLFASALPVADDDADFFGTFAISPGRPAKELDAAYGPGLLSPTEQAMSVAELIEARLAGKADYADRVRLGSIVLIVRTLDEHEAITGVGISLEPVEPATHLPIFISFAEILNRMRAYLAQRRQPRAAEMEESAPAPATAARENEG

SEQ ID NO: 8351 - protein, 136 aa, Xenorhabdus sp.
LRDPHDLPLNGSRVFLQDINITHMLRSALTGLALALLDALSNDDSQHYQTIRHQTGLHLNERPAAYGGRKQPIATLLPSATSHNDSALETGCGVEHTGRMTDSREQSCYITACGNAAPNIIIHLALLANAGEARLL

SEQ ID NO: 8352 - protein, 176 aa, Xenorhabdus sp.
  unsure (1)..(176): unsure at all Xaa locations
KRPGVATGPLLQGKQLSYNNINDTDAAYELVAEFLPENAPAVAIIKHANPCGVATGPTLAEAYRRALACDSVSAFGGVIALNRTLDAETAEEIVKLFTEVIIAPDVTEEAKSIIARKPNLRLLTAGGLPDPRAAGITAKTVSGGLLVQSRDNGMVEDLDLTLEHXXXXXXXXXXXX

SEQ ID NO: 8353 - protein, 219 aa, Xenorhabdus sp.
  unsure (1)..(219): unsure at all Xaa locations
MQVVHEEQENMSAKFDISFANSASLENALAVVLQASGEAQAVAGASEADPGGVIDRAAKISGFSAKSMTTLDVIAPQGSAADRLLVIGLGKPSKLVAHDWLRAGGTAAAGFRKADKVAIYLDAPGIEVGAQAAADFALGLLLRAYSFDAYKTKKKSDDEXNPKKVDVIIVTAAHXXXXXXXXXXXXXXXXXXXXXXXXXXXXXXXXXXXXXXXXXXXXX

SEQ ID NO: 8354 - protein, 188 aa, Xenorhabdus sp.
IVSYLAVSAIGAIWSSCSPDFGPAGASDRLSQIDPKILIAVPEYGYAGKRIDVGPTIRAVAESAAPEKIVLIVDAVPESLADLGCVTLTDFVAPYAAGEIAFNRLPVKAPLAILYSSGTTGKPKCITHSGGGLLLQHMKELKLQCDIQEGERFFYFTTCGWMMWNWQVSGLALGATLVTYDGNPGYPN

SEQ ID NO: 8355 - protein, 192 aa, Xenorhabdus sp.
IVATLVWAVWEVGFDWWQLGPRGGLIILIGLWLLVPWVRRPLGFASPTGLNYGPNAWPLALSVLASIVVAGYSMTQDPHDQAGSLPQETASAAPAYGGNVPDGDWHQYGRTPYGQRYSPLTQVNVDNVSQLKEAWRYQTGDVKLPDDVGETTYQVTPLKVGNTLYICTPHNWAIAIDAATGKEKWKYDPNVL

SEQ ID NO: 8356 - protein, 217 aa, Xenorhabdus sp.
  unsure (1)..(217): unsure at all Xaa locations
MEHTRNDTMDGGNFDLKEEIRDYWSKRSETFDLAFGHRIAAGPEADAWQKPIRQLIGPEPKRVLELACGTGEVTRLIHDLGHDVTALDFSEAMLAVARAKHAGKPRLRFIMADAENTMEPEASYDAIICRHLVWTLTQPEQTFREWFRLLRPGGRLLFFDGDWATPKPAGRLAGLLISLIDHVVGEDRNYDGALGNRHAAIMKALPFGQGLRPQMLX

SEQ ID NO: 8357 - protein, 92 aa, Xenorhabdus sp.
MIDERNKQARKTSGRFRRRPVAIEKQKPTAGTEKPEPFAERLFGLRQSPDQMPADDRVIGCFGFHGVFGIRHDEAQPRFAGVFGARHSQHRL

SEQ ID NO: 8358 - protein, 194 aa, Xenorhabdus sp.
GEAAMLAGLLKAPSRLSPARDPQAAEERAQVVLQSMRDVGFITDDEIKTAMSQPPTKAKRFWSGAEHYAADMVLEEVRSLVGDVKQDIVVDTTIDPNLERDAEKALTHVLQGDGKKQGASQAALVSIDGTGAIRAVVGGADYAESQFNRAAKAKRQPGSAFKPFVYVSPLESRMTPYTIRNDAPVRIGNWTPEN

SEQ ID NO: 8359 - protein, 77 aa, Xenorhabdus sp.
  unsure (1)..(77): unsure at all Xaa locations
MVAVRQAVEMVDGAGKSSGGGAGGXVFRNSHFRGEHTGMEFRRVIEAAATVDVGCRQQSFDQRRGSQPQIGVEIHVT

SEQ ID NO: 8360 - protein, 32 aa, Xenorhabdus sp.
  unsure (1)..(32): unsure at all Xaa locations
MGKHRIDLAGIGGEVGLGDGAVADPLEHIAXX

SEQ ID NO: 8361 - protein, 275 aa, Xenorhabdus sp.
  unsure (1)..(275): unsure at all Xaa locations
XXXXXXLRRCRGKRMSQSNCSLSFVASTTEEAQTALEELKRVYGDTPFEEAEVIVALGGDGFMLQILNETMNSGKRVYGMNRGSVGFLMNDYRVEGLLERIAVASGNDFHPLRMTTTDSDGDEFTALAMNEVSLFRQSHQAAKLRVEVDGKVRLEELICDGMMVATPAGSTAYNFSAHGPILPLESPLLALTPVSAFRPRRWRGALLPNKVTVDIHVLERDKRPVNAVADHTEVKSVRHVRIAQSQDRTARILSDPDRSWXDGXLAEQXNLRAXX

SEQ ID NO: 8362 - protein, 96 aa, Xenorhabdus sp.
ERLYYALRKSWSDETSSLWSRENPARGQGGVTALVVQDIFGGEIAKTAISGADHFYNIVEGIRWDFTFAQFDIPIGYQDRPSTRVEAMAKITPLQY

SEQ ID NO: 8363 - protein, 213 aa, Xenorhabdus sp.
LPDLRDSSGDFGTTSGVPDIKDGTPILAAIGDSHAALFGHGAFNPGDGKVTFGTGSSVMTTLPHFIAPERGITTTVAWRLGGKPTFAFEGNILVSAASLPWMTEILGLPDVAALVELAATAAPNGPGFVPAFVGLGAPYWDTNARALFFQINFSTTRAQMARAVTDSIAFQVHDVFAAMRAQSPSGFGRLFVDGGPSQNRFLMQCLGDMLQHP

SEQ ID NO: 8364 - protein, 200 aa, Xenorhabdus sp.
  unsure (1)..(200): unsure at all Xaa locations
XXGVLQHVAKALHQETVLARAAIHEQASKARRRLRAHGGEDVMDLKGNRVSDGAGHLGTRGAEIDLEEQGARIGIPIGRTEANEGRHETGTVWRGSGGEFHQRGDIRQAENLRHPGQGGCRNENIAFKGKGRFAAEPPCNGGGDAAFGRDEMRQRRHDRRTGAESDLTIAGVEGAVAEEGCVAVADGGEDRCAVLDIGNA

SEQ ID NO: 8365 - protein, 219 aa, Xenorhabdus sp.
  unsure (1)..(219): unsure at all Xaa locations
XXXXXXXVGSIFAVSQVQADGDTNVLRKGREYLCAGYAIYGPSTLFVITFGLGVVGFTLDPSDGQFKLTNARMRVPTETTEFAVNSSRQRFWDEPIRRYVDECLAGSAGPRGQDFNMRWTASMVADVHRILTRGGVFLYPADESNRRAGGKLRLMYEANPMAFLVEAAGGAASTGTEDILRIQPQAHHQRVSVLLGSSNEIQRLVQFHQIHHSQEEIGS

SEQ ID NO: 8366 - protein, 69 aa, Xenorhabdus sp.
HIGAPMPGVISRVFVNQGQEVKAGDVLLSIEAMKMETALHAERDGKIAEVLVRPGDQIDAKDLLISYAE

SEQ ID NO: 8367 - protein, 169 aa, Xenorhabdus sp.
MVKVAAGTLRGSLENGIHAFLGVPYAAPVTSERRFEAPQPVPPWQGARDATRLGPVCPQIPTYGPVGTAATSKLAFGEDFLTVNIRTPDPAGRAPVLFWIHGGGYAVGSANEPVLQSGAFAASGIVEVTVNYRLGALGFLHLEGKPDNRGLLDLVAALEWVRDNVAAFG

SEQ ID NO: 8368 - protein, 141 aa, Xenorhabdus sp.
  unsure (1)..(141): unsure at all Xaa locations
XXXXXXXXXXTPREIFDRPKTDFVASFIGAGSFLTGTVVAPGRAEIPGLGFLHFSGAVPVGQKARFLVRPHRFLLGDGVNAFSGIVEHVTYRGQMLTLGVRAGDHRLQADLPTHAAALPAKGERVTLSVAPEDVTLIGEAA

SEQ ID NO: 8369 - protein, 158 aa, Xenorhabdus sp.
MATYGLPVSNPLHRVMYGPIRDDDRSLPAIPYGRIDPRYLRQEVSYQTAEAPGTIVVDTRQHFLYLVQPGGKAIRYGVGLGRDGYAWSGRGKIQWKAKWPRWTPPDEMVKRQPELASISAANGGMTPGLNNPLGARALYIFKDGKDTLYRVHGTPDWP

SEQ ID NO: 8370 - protein, 149 aa, Xenorhabdus sp.
FLANSHVAHDCRLGSHIILSNNVMLAGHVTIEDRAILGGGCAVHQFTRIGRQAFIGGLSAVNYDVIPYGMLNGNPGILGGLNVVGMTRAGIERADIHKVRRVYKAIFEAEGTIRGNAAAIDRNDYLDCPQALEVIDFIGADSDRAISSP

SEQ ID NO: 8371 - protein, 55 aa, Xenorhabdus sp.
  unsure (1)..(55): unsure at all Xaa locations
VAGSGQLPLYVAAAAREMGENPFIVRLRDDSSFDWSGFDNAVINVGDVAGLXXXX

SEQ ID NO: 8372 - protein, 100 aa, Xenorhabdus sp.
VDIGALDTGAGHADDIEAAENAGIAIQHAIGNDIVIDRRKSADEGLAADTGELVHGATTAQNGAILNGDMARQHHIVRQDDVAAKTAIMRHMRIGKEQIL

SEQ ID NO: 8373 - protein, 31 aa, Xenorhabdus sp.
  unsure (1)..(31): unsure at all Xaa locations
VRLRDDSSFDWSGFDNAVINVGDVAGLXXXX

SEQ ID NO: 8374 - protein, 46 aa, Xenorhabdus sp.
MVVALEAPFYGEGLGALMIEDQFLVTSSGAECMNSLPRTLRDLSRQ

SEQ ID NO: 8375 - protein, 124 aa, Xenorhabdus sp.
YIDSHLLDPALSVGKIMAEFGVSRRTVYRLFEPLGGFSACITHRRLERAMDFLRSPQSGHMTIAEVAATYGFTNPENFSRAFKKTFGLSPRQLRHFASESRDATSDILKPDSAEWTRWIVQLGR

SEQ ID NO: 8376 - protein, 203 aa, Xenorhabdus sp.
  unsure (1)..(203): unsure at all Xaa locations
KETASQTAGPYVHIGCTPNFVGIEGVFEKDLGSGPLYNDKARGERISVRGTVYDGAGMPLKDALIEIWQADTDGYYNSPSETRGKADPNFIGWGRSPGDMDTGEFIFETIKPGTVPFRDGRPMAPHITFWIVARGINIGLQTRMYFPEEQEANAADPVLARVEQKSRIATLVAKKEEGNVYRFDIRLQGEGETLXXXXXXXXX

SEQ ID NO: 8377 - protein, 43 aa, Xenorhabdus sp.
MKFGLDDHCDADCLLEKARDQMRRFVSQRQPAGPKILYFMSIL

SEQ ID NO: 8378 - protein, 146 aa, Xenorhabdus sp.
  unsure (1)..(146): unsure at all Xaa locations
EHISPFLLLDYAGPERFAPGKTPRGVGAHPHRGFETVTIVYQGEVEHRDSTGSGGLIGPGDVQWMTAAAGILHEERHSQAFTKQGGTLEMVQLWVNLPARDKSAPPAYQTVLDGDIPAVALPDNTGTVRVIAGDYAGHGARRATLX

SEQ ID NO: 8379 - protein, 118 aa, Xenorhabdus sp.
AHALMHSHHFKALRVTNDRAEIVGIVTQTDFLEKASWRNGRPSIGFLQRLRLIFSGASAPNDTVKDIMTSPVRTVRPETSIEEAIIRFAEEGLHYLPVIDARGKMVGIVSQSDVMVAM

SEQ ID NO: 8380 - protein, 192 aa, Xenorhabdus sp.
WLVDLRKDKPHQLDDQLEQLFLEKSMTSAAAFNRLFDETMADLRFNIDGASLPLEVTLNMLQEPEPETRKKAAEALGATFKDNLRVFTLITNTLAKDKDISDRWRKFEDIADSRHLANRVEREVVDALATAVKKAYPRLSHRYYAMKARWLGMEQMNYWDRNAPLPDTSNTIIPWDEARDTVLSAYGNFAPE

SEQ ID NO: 8381 - protein, 196 aa, Xenorhabdus sp.
VITRDQMEAQTVRNLSEALNYVPGVVAQLSGSDPRFDAPRIRGFAGNQLQFLNGLRLMRTAGAPSYEVYGLERVEVIRGPASVLYGQGNPGGLINLVSKRPTFERFGEVGAQIGSFDYYQSMFDIGGPVADSDSFAYRLTGLARNAHAQTDNLQNDRYFIAPALTWQPDEDTKLTVLASYQHDNPSSPSGPPPGVN

SEQ ID NO: 8382 - protein, 177 aa, Xenorhabdus sp.
GIKVSRKRRPADYASAIDNYIEKLDSHRGAVFSSNYEYPGRYTRWDTAIIDPPLGISCFGRKMWIEAYNGRGEVLLGFITEKLKTTPDLTLGASTTRRLDLTVNEPDRVFTEEERSKIPTVFTALRAIVDLFYSNADSAIGLFGAFGYDLAFQFDAIKLSLSRPEDQRDMVLFLPDE

SEQ ID NO: 8383 - protein, 156 aa, Xenorhabdus sp.
MLTIGSQQPFHPSSINVANLLRGMADILEIAVGPKCRIALDLDDGLPTIPLDPALFEQSILNLCLNAAAAMPDGGLISIEAACEKDALVISVTDEGIGMTPEAVDKAFEPYFTTRGDHGGAGLGLAMVYGFVRQSGGEAHISSKPGEGAKVQLTFP

SEQ ID NO: 8384 - protein, 66 aa, Xenorhabdus sp.
MLGLSIYCNSHYSNAHDSTAEASDVKISDIGDLYNGGTYYQGTKCHASLSDACLTAESRYNEASYN

SEQ ID NO: 8385 - protein, 114 aa, Xenorhabdus sp.
VKAQPKYGYNEDRDIVQASGMLRMDDNWSLFGSINYDLNGKFAAERRIGILYQDECTIFTVSYSDEGNINSSRQSANDWSINARLAFRTLGDISVGSANEDWADMDIGWKPNNY

SEQ ID NO: 8386 - protein, 172 aa, Xenorhabdus sp.
KRAFFAVGLASALMNILNLSGSLFMLEVYDRILPSKSIPSLVALVVLLIILYAFLMGFDMLRSRILARISDDMDDTLNQRLFRASIGAPLLASTRIDGLQIVGDLDQIRQFLSGPGPGAFFDIPWLPIYLLICFALHPGIGFAVLGGAAILVVLTLLTNWLTEKATKQAYAA

SEQ ID NO: 8387 - protein, 140 aa, Xenorhabdus sp.
VQGKADQQIYGQPGNIKKCSRSGAGEKLAYLVEIADDLQPVDPGGGKEWGADRRPEEPLIERVVHIVGDACQYPAAQHIEAHQKCVENDEENNQRHKRRDALAGQDAIVNLQHEKRAGKIKYVHQCAGEADGKKGALIFC

SEQ ID NO: 8388 - protein, 179 aa, Xenorhabdus sp.
  unsure (1)..(179): unsure at all Xaa locations
IDTEAEVQGVGENLQDHLQLRMVYKVSGVLTLNERASTLFGKARIGLEYALTRSGPMSMAPSQLVVFTRSSPEKETADLEYHVQPVSLDKFGDPVHTFPAITESVCNLQPESQGSLHVKRPDFAMQPDIRPYYLSTEGDRHVAIDYMRLTRRIVTQAVFAPFKPHEYRPKTSFENDNDX

SEQ ID NO: 8389 - protein, 131 aa, Xenorhabdus sp.
  unsure (1)..(131): unsure at all Xaa locations
MSRYFKLLGFNEVMNEFSIVCRILGTLFNRAPQDPMLQPLMNMIAEGKLKQAWPLEQDELLVRLQQNSDLSVIESDYQALFVGETAKVAICRSDYTDETKNEVRQFLNEPGMPLSDTAAXXXXXXXXXXXX

SEQ ID NO: 8390 - protein, 144 aa, Xenorhabdus sp.
NATPSAEKSADNHPAAATSTGSEKGDYDAAVALAINTKEYDKAIVAFQNFVKAYPKSKYLSNANYWLGQLNYNKGKKDDAAYYFATVVKNYPKSSKSSDSLYKVGLIMQEKGQKDKAKAVYQQVVKQYPGTNAAKMAAKKITGM

SEQ ID NO: 8391 - protein, 158 aa, Xenorhabdus sp.
  unsure (1)..(158): unsure at all Xaa locations
LDPPGLAPVFLALTAGMTRDQRSQVALRGSIIAFGILAVFALFGLAILNLLGISLGAFRIAGGLLLFWISFEMIFEKRQERKEKTSEIAITKDHLHNLAVFPLALPLIAGPGAISATVLLAGTMKTTIEMVVLILILAFAMALVYTALIVSERMDRVX

SEQ ID NO: 8392 - protein, 49 aa, Xenorhabdus sp.
MSQEGNAIARSDNAFWFPQYMKNNILGVPYDDIEEEFERERAAKARDVQ

SEQ ID NO: 8393 - protein, 43 aa, Xenorhabdus sp.
VAGKSEAAAEFQLSPYYGHVPIPGIGRYEMYQSWDDFEETIGF

SEQ ID NO: 8394 - protein, 166 aa, Xenorhabdus sp.
  unsure (1)..(166): unsure at all Xaa locations
XXXXXXXXXXXLSFNQLMFHLRQGLSIILEEHAIQLPLTEYSHGLNIATLPNANMVNTFSFILAVHAETTNETLMSHFPAQMKIAPVGRIRELVQLQLPGIAIRALPSVPRQIPWHSGYVYFELEKEGDLWKQMDKAGGFALHLAGDFPGLNMEFWAVRNQPKQPK

SEQ ID NO: 8395 - protein, 35 aa, Xenorhabdus sp.
MLRTGAQWHDLYLGWGLQGLDSGSDVGCISVADPG

SEQ ID NO: 8396 - protein, 115 aa, Xenorhabdus sp.
  unsure (1)..(115): unsure at all Xaa locations
MIQTTLYFGLNRPSGPVITAAEWQIFINRKVTPRFKDGLAVFDAKGQWLGNDGKLTPQNSKALLXXXXXXXXXXXXXXXXXXXXXXXXXXXXXXXXXXXXXXXXXXXXXXXXXXX

SEQ ID NO: 8397 - protein, 96 aa, Xenorhabdus sp.
AMQAISRTPENLASQLWNRNHQYPDGAVFFLGTMFAPVKDRHGPGLGFTHAKGDRVEISTPKLGKLINWVTTTDECPEWTFGTAALMRNLAKRGLL

SEQ ID NO: 8398 - protein, 178 aa, Xenorhabdus sp.
GMLVSQDYAGSQTGAVAYALALEEIAAGDGACSTIMSVHNSVGCVPILKFGTEDQKQRFLPKLASGEWIGGFALTEPQAGSDASNLKTRARRDGDRYILDGAKQFITSGKNGDVVIVFAVTDAAAGKKGITAFIVPTDTPGYEVIRVQEKLGLHSSDTCQIAFTEMAVPAQLRLGEEG

SEQ ID NO: 8399 - protein, 81 aa, Xenorhabdus sp.
  unsure (1)..(81): unsure at all Xaa locations
XXXXXXXXXXLPLFAQPQLGRDRHLGEGDLAGIGRMQAELFLDPYDLVTRRIGRHDEGGDALLARRRIGDGKDDDDITILA

SEQ ID NO: 8400 - protein, 48 aa, Xenorhabdus sp.
MGSRWGINRTVGQVYALLYISPQPLCADDIVEALGISRSNVSMSLKEL

SEQ ID NO: 8401 - protein, 228 aa, Xenorhabdus sp.
  unsure (1)..(228): unsure at all Xaa locations
WAWVQADADGYAGYVPETAIGDVVAATHRVIAPRTLLYPSAELRKPPVAALSMGSLVRIVGEAETRGTRYLMTDKGEGIIAGHCQTVDAACDDDYVAVALRFIETPYLWGGRSGFGIDWSGPRQLSMAMTRRRVLPDTHMQGKALGGEIKPDQLGPGDLVFWKGPVGPMENQETLLHAHGHTMNVPPQNLDAGIEPIGWLYEXXXXXXXXXXXXXXXXXXXXXXXXXX

SEQ ID NO: 8402 - protein, 318 aa, Xenorhabdus sp.
  unsure (1)..(318): unsure at all Xaa locations
XXXXXXXXXXXXXXXXXXXXXXXXXXXXXXXXXXXXXXXXXXXXXXXXXXXXXXXXXXXXXXXXXXXXXXXXXXXXXXXXXXXXXXXXXXXXXXXXXXXXKAGDLAAMLTTFEXHDVLFIDEIHRLSPVVEEILYPAMEDYQLDIMIGEGPAARSIKIDLPPFTLVGATTRAGSLTSPLRDRFGIVQRLEFYNIDDLQSIVSRSARYMGLEISDDGARQIAMRSRGTPRITNRLLRRVRDFAQVKGDGSVDNDIAAKALDMLNVDSAGFDYLDRKLLVAIIDKFMGGPVGLDNIAAAIGEERETIEDVLEPFLIQQGL

SEQ ID NO: 8403 - protein, 56 aa, Xenorhabdus sp.
MYVEECSMRRARRSGLVYIRDSIACHKSTQAGLVNAISCAGRALQRVVQMLRSGWM

SEQ ID NO: 8404 - protein, 178 aa, Xenorhabdus sp.
KLLNVSYDPTRELYKDFNEAFAKKWKADTGEDITIQQSHGGSGKQARSVIDGLEADVVTLALQSDIDAIVENSGKINKDWRTRLPHNSSPYTSTIVFLVRKGNPKGIHNWGDLVKGDIQIVTPNPKTSGGARWNYLAAWAWANEEFKGDQEKIKAYVGDLYKRAPVLDTGARGSTVTF

SEQ ID NO: 8405 - protein, 168 aa, Xenorhabdus sp.
  unsure (1)..(168): unsure at all Xaa locations
FFEPEFLSWLSSYQLPKYELFKRDGQYELNFHGRWMDTTLWEIPALAIINELRSRSAMRSLGYFTLDVLYARAKAKMWEKVERLRELPGLRISDFGTRRRHSFLWQRWCVEALKEGIGPAFTGTSNVLLAMDSDLEAVGTNAHELPMVVAALAQTTLEHXXXXXXXXX

SEQ ID NO: 8406 - protein, 102 aa, Xenorhabdus sp.
MWKAADPVVGGWIRDNLGPKRIATDLKDGVKAALKLAEAAPEIAAKTEKLHSDLMYMSENGLRFDAQTAEAIGKAEARHTKWGRIALWVIALTLLYIAVRVS

SEQ ID NO: 8407 - protein, 118 aa, Xenorhabdus sp.
APCSSTGTLRKHPDVCWTKDETDIAKLAALQGQMLRHAVTLVRSGGVVVFSNCSLDPSEGEAMIAEVLAENPDIERIAVRKEDWPGMEVAISPQGDLRTTPDMFGGVDGFFSSVLRKK

SEQ ID NO: 8408 - protein, 179 aa, Xenorhabdus sp.
TIGVEFMHMSSPEEKGWIQERIEGPDKGVAFTAEGKKAILSKLVEAEGYEQFLDVRFKGTKRFGLDGGESLIPALEQIIKRGGQEGLEEVVLGMAHRGRLNVLTNVMGKPHRAVFHEFKGGSFKPDDVEGSGDVKYHLGASSDREFDGNKVHLSLTANPSHLEIVNPVVMGKARAKQDQ

SEQ ID NO: 8409 - protein, 39 aa, Xenorhabdus sp.
  unsure (1)..(39): unsure at all Xaa locations
VLPCRRLIQNDDAAPAILGEGIENLAQRLAGKDELAFPX

SEQ ID NO: 8410 - protein, 206 aa, Xenorhabdus sp.
  unsure (1)..(206): unsure at all Xaa locations
KKQNALWENVKVIIQALVLAMVIRTVLFQPFTIPSGSMMPTLLVGDYLFVNKFSYGYSKYSLPFSPNLFSGRILEFSKPKRGDVVVFRLPPNPEVDYIKRLVGLPGDRVQMMNGVLFINGQPVPKQPDGTFTSDYRADPGANVPVFRETLDNGVTYDTLDQSPDSRGDNTREFLVPEGHYFMMGDSRDNSLDSCRXXXXXXXXXXX

SEQ ID NO: 8411 - protein, 34 aa, Xenorhabdus sp.
  unsure (1)..(34): unsure at all Xaa locations
VQDHYTEIVTTRGHQLVLLRFSDALKEVGQTEGX

SEQ ID NO: 8412 - protein, 178 aa, Xenorhabdus sp.
  unsure (1)..(178): unsure at all Xaa locations
IEVQGRVSGGNAFARFVALNNLRAELAELQVERERLIASVSTFQELLDSIEQPVWRRNGEGDLIWVNHAYAQAVDARSTEQAVQEKRELLNTVTRQKIRAAATPESPYHDRISTVVSGNRTFFDVVDIKTAAGSAGIAIDATEAEAISEELKRVLKSHAETLDXXXXXXXXXXXXXXX

SEQ ID NO: 8413 - protein, 210 aa, Xenorhabdus sp.
IIVSSGGRGRLSTYVAGAFLLFLILVLDDLVRIIPMAALVAVMIMVSIGTFSWRSIIDLRRNPPSSSIVMLVTVGTVLATHDLAKGVLAGVLLSGVFFAGKVSKLFHVRPELSADGRERIYRVDGQIFFASTESFIAAFDFAEEVEAVTIDVTEAHLWDISAVGALDKVVLKFRKVGRRVEVIGVNEASAHMIDRFALHDKQDAAAAPLH

SEQ ID NO: 8414 - protein, 188 aa, Xenorhabdus sp.
DNKYGCKESLVDGIRRATDVMMAGKVAVVCGYGDVGKGSAASLQGAGARVKVTEIDPICALQAAMDGFEVVRLEDVVSSADIFITTTGNKDVIRIEHMREMKDMAIVGNIGHFDNEIQVASLRNLKWTNIKPQVDMIEFPKGNRIILLSEGRLLNLGNATGHPSFVMSAFFTNQVLGQIELFTKQGEY

SEQ ID NO: 8415 - protein, 108 aa, Xenorhabdus sp.
  unsure (1)..(108): unsure at all Xaa locations
XXXXXXXXXNCQHYQGRLPPGADDGAGAANEQRVDSLAAVGVDKPLIDSYQGHSERVKRLIQQTLAPYPTLHIIDGNPSSEHSPKALKHTGYNADTDEFQPGLYTDYP
